United States Patent Application Publication US 2025/0320452 A1 - sequence listing, part 6

SEQ ID NO: 5 - DNA, 3977413 bp, synthetic construct (residues 1,988,708-3,977,413 of 3,977,413)
  source 1..3977413: mol_type = other DNA; note = Synthetic E.coli genome
cgtccgtttacctttggtgactggctggtattgattgtcctgaccgccgtaatggtctgggtgatttggggcgtgatcgttaatgcctggtttattccagaaattgccagccagttcttcaccatgggtctggtgattggcatcatcggcgttgttttccgccttaacggcatgacggttaataccatggctagttcctttaccgaaggggcgcgaatgatgatcgcccctgccctgctggtgggtttcgccaaagggattttgctgctggtcggtaatggtgaagcgggtgatgccagcgtgttaaataccatcctcaacagcattgccaatgccattagcggtctggacaacgcggtcgcggcctggtttatgttgctcttccaggcggtatttaatttcttcgtgacgtccggttctggtcaggcggcgttaaccatgccgttactggcaccgcttggcgatctggtcggtgttaaccgtcaggttaccgtgctggcgttccagtttggtgatggcttcagtcacatcatttacccaaccagtgcgagcttaatggcaacgctcggtgtgtgcagggtggacttccgtaactggctgaaggtgggcgcgaccctacttggactgctgtttattatgtccagcgtcgtagtgatcggcgctcagttgatgggctaccactaaaaatgttaagagccgcaattgcggctcttttttcattctgccgtttcagtctctacggcttcatttttggcattgcgcttcatccacaacgctagcgctttcaggctgtctggagtgaactcatcgcagcgtgcggtgatttcttccggcgtcagccagcaaacttcactgacttcatcttcctgtagtgcgaagggaccgtgagagacgcagctgaacaatgcgccccagacacggcaatttttatcttcgaaatagaactgcccgtgctcggcaaaggggacaccggcaatgcccaactcttcttccgcttcgcgacgcgcggattccagcagttgctcatcggcctggactacaccgcctgcggtcgcatctaacatgccgggtaaaaagtcttttgtctcggtacgacgctggaccagaattttgcccatgccatcatgcacgacgatgtaagttgcacgatgacgcagacactgtgcccgcatttgttcccggctggcttgtgcaatgacttcgttctcttcattgacaatatccacccattcagtacttgccaaacgacgctgttccattatcaggaaaccttctttttctggcgctcttacggcgcattttgagttgtgggtaaattacggattaatcgcgacctgcgcaatgatactttgatcattgagtgcgattacactaagtacgtcattatccagcatgccataactcgccggattaccgcctttcggaatactcacgctgccggggttgaagtggaaaatctccccccgctgttctgccactggcagatgggtatgaccgtacaccagcacatcgttctggtttaaagcaggcagattttccgggccaaaaagatgaccatgcgtcaaaaacagacgttgtttttccagtaatacctgttgccacggcgcggttatcgggaaatgcagcagcatttgatccacttcgctgtcgcagttgccgcgcacagcgataaccttatgtgccacttcattaagccgttcagcgactttggctggcgcgtaaccctccggtaaagcattacgcgggccgtgattcaacacgtcgccaaggatcaccagccactgggcaccgctttgggcaaacaactccagaacacgttccgtcgccggtaagctcccatgaatgtcgcttgcaaacatcagtttcatcactcactcctcgtcgaaaaaacgtaagctatgatactggattctgtcgttgctatcagccagattgcttcgcgctaagtgcaataaaacgctggacagacgctcgctgccactggaatgttgcataatccaccaggcgttctggcacctcatcgccatgtagtaccaggcggttaatcattagcgccagatcagtatcagcaatgcaccattcaccaaataaattcggctgacccagtactaacaaatgttctgccatcgcgaacagtttctctgcactggcttttccctcggccgttagtggcgcttttttcgcccccgcaaagacaacatccgtcggacgctcttcgcggatgggcatcagatcgctgcgcagccaggcctgaatctgtcgtgcacgcgcacgattttctaaatcaagcggataaatacgttcccaggtcggtggcgcaaatcgatcttccagatactccgcaatggcagaagattcactcaactcaaaatcatcgatttgtaataacggcacacggcgtgtctgaccgtaaccttgccacgtcggctgcaaatgttcaccgctgtcgaggtcgatggtcttgatatgaaagctcaggcctttttcctgcaacgccacccaggcggataacacataaggggagaaaaagtgggcatcactccaaagcgtgatagcgggtttactcattatgtcctcggcaataaagggggctggctatcaaactatagagcctttttgtcactgtcacgtgacgaatactcacgtaagtcgccgcgctttctatacttgtggtgttcagatgattaaacaaccggagctgcaatgatcgatctctatttcgccccgacacccaatggtcacaaaattacgctgtttctcgaagaagcagagctggattatcgcttgattaaggtagacctggggaaaggcggtcagtttcgtccggaatttttgcgcattagccccaacaacaaaattccggcaattgttgatcattctcctgccgatggcggcgaaccgctaagcctctttgagtctggtgccattttgttgtatctggctgagaaaacaggactctttttgagtcatgaaacgcgtgagcgcgccgccacattacagtggttattctggcaggtaggcggactggggccgatgcttgggcaaaatcatcattttaatcacgcagccccccaaaccattccttacgctattgaacgttatcaggttgaaactcagcgtctttaccatgtactgaacaagcggctggaaaacagcccctggctgggaggcgagaactacagcattgcggatattgcctgctggccgtgggttaatgcctggactcgccagcgaattgacctagcaatgtatccggcagtcaagaactggcatgagcggatccgtagccgccctgccaccgggcaggcactgctaaaagcacaactcggtgatgagcgtagcgatagttaacagaaacaggttctcgtgtattatttcatcctaagtaaaacaacggagaacctgcaatggcacaacctgccgctattattcgtataaagaaccttcgtttgcgtacgtttatcggaattaaggaagaagaaattaacaaccgtcaggatattgttatcaatgtgacgatccactaccccgccgataaagcgcgcactagcgaagatatcaacgatgcgctgaattatcgcaccgtaacgaaaaacattattcagcatgtagagaataaccgtttctctttgctggaaaaattaactcaggatgtgctcgatatcgcacgtgaacatcactgggtgacgtatgctgaagtggagatcgataaactgcacgcgctgcgctacgccgatagcgtatccatgaccttaagctggcagcgttaatcgccatatcgggaggctgcatgaacatagtgatcaccggagggacaggattaattggtcgccatttgattccgcgtttgctggagctgggccatcaaattacggtagtgacgcgtaacccgcagaaagccagttccgttctcggccctcgggtgacactatggcaagggcttgccgatcaaagcaacctcaacggcgttgatgcggtaatcaacctggccggagaaccgattgctgataaacgctggactcacgagcaaaaagagcgtctctgccaaagccgctggaatatcacgcaaaaactggtcgatttgattaatgccagcgacacgccaccgagcgtactcatttccggcagcgcaacgggctattatggtgacttaggtgaagtggtggttaccgaagaggaaccgccgcataacgaatttacccataaactctgcgctcgctgggaagaaattgcctgccgggcgcaaagtgacaaaacgcgagtgtgcctgctgcgtaccggtgtagtgctggcaccggatggcggtattctcggtaaaatgctgccgccgtttcgtcttggcctgggcgggccgattggctctggtcggcagtatctggcctggattcatattgatgatatggtcaacggtattctctggctgctggataacgagctgcgcgggccatttaatatggttagcccctacccggtacgcaatgaacaatttgcccatgcgctcggtcatgcgctgcatcgcccggccattttgcgcgtccccgcgaccgccattcgactgttaatgggcgaatctagtgtactggtattaggtggacaacgcgcgctgcctaaacggctggaagaagcgggttttgcgtttcgctggtacgatttagaagaggcgctggcggatgtcgttcgctgatgtggtttacagcaaacatccgccagttaactcccggtgttacaggattagtggctttgcgcgataagatcgtctggactaagtcgggtcaccatcataactaactctctgtctaaacctctatccagcatctcctgagcaatacgcagggcttcttcgtgtttgccctgcattgcgccttcttcacgtaatctgtcagcaatggtcatcagtttctccttttcttgtggtgcgcgttccgctatctcaccaataaatgcacgaaaacgctgggcatcccctgtttgtaatacgtaattaaacagggcttttagctgtctgtcattagtgttccctgtaactagcaggctaacaatttggtcgactaatcccaacagatcgcgctgacgaatatgtttctgaattaactccaacagcgccattttgcggtgttgcataatctcgtcatccggcaccacggtaatatccaccaacggaaaagcgctactatatattttgcgggctatagcaggctcggcaaattcatcaagccagcagagactataaggataaggacttctgcaaccatgataaaacagcatcgggagcaccaatggaagctctttatagcccgcatcaagatggttttgcattgccgcaatggaataacgcatcatgcgaaaagccattaattcttccggcttactttggtgctctatcactacataaatataacccactccctcctgcgttttcacagaccacaagaggtcggaataatattgccgcaggtcttcatcaataaaactgtttggttccagtttaagcgtcgttaaatcacacagtttgcgcagcggcgcgggaagatgaatatcaataaaatcccgcgcggtgtctggatggcgtaaaaaagatttaaataccgcatcatgcggcgtggaagttgtgcttattgtcatggcgttccgtcacccctcaaatttaagatgacgcgacaataaccacgattaacacccaatgcagcaggcagtttttatctttggacagcgaattcagaagtatttttagcggactgtaacttttacatttcagcggaagctgactcgcaaattccccatgaaaatactccggcagcgttagccaccggagaggaaattatttcaggcttcccttaaggaaccgttgcagacgagggctttgcgggttgccaaataactgctccggcgcgccctcttcttctattttcccctgatggaggaaaatgacatgagtagaaacatggcgagcaaagcccatttcgtgagtcactaccaccatggttttcccctcttctgccagttgctgcataatacgcaacacttcgcctaccagttcaggatcgagcgcgctggtaggttcatcaaacagtaaaacttccggttccatcgccagcgcccgcgcgatagaaacacgctgttgctgaccgccggaaagatgcaccggatatttcccctgcgcacgttcgtctatcccgacttttgccagatacttcaccgcccgctcgcgcgcttcctgcttgctcaggcccaacacctgaatcggcgcttccatgacgttttccagcaccgtcatatggctccagagattgaagtgctggaataccatcgtcaggcgtgtgcgcagtaagcgcagttgatttttatcggcgactttgagttgaccgtctttgtcgcgcaccagattgatcgtctggccattgaccacgatgctcccttcactcggtttttcgaggaagttaatgcagcgcagaaaggtacttttcccgcttccgctgcttccgatgatgcttattacatctccggcattcgcttgcagacttacccctttcagcacttcatgttcgccgtagcgtttgtgcaaatcgataacgtttaatttattctcggacatcgtattctcagtgcgtactagaaggtttcacatgctgcaaccagcgtttttccgctctgcgaaagaggctgatcaggacataagagatgattaaatagagcaccgcggcaatgccgaaggcggtaaaaggttgatacgtggcggcgttaatatcgcgggctattttcagcagatccggcaccgtggcagtaaatgccaacgcagtagagtgcagcatcaggatcacttcgttgctgtatgccggtaacgcaatacgcagcgcagaaggcaaaataatgcagcgatacattttaaaagtgctgaagccataggctctggcggcttcaatttccccatgcggaacgctacggattgccccagcaaaaatctcggtagtgtaagcgcaggtgttaagcgtcagcgccagcacggtacagttcaggccactgcggaagaaagcgttaaggaattcggttcccttaacaatctcaagcgtgtacatgccggaatagaacaccagcaactgaacatacagcggcgtaccgcgaaaaatataggtaaataaccagattggaaactggatgtatttattactggagacacgaccaatcgccagaaacagcgccaggactccgcctatcactacgctcaaaataagcagccacagagtgatcgccacaccagtaaagcgataaccgtcggtccacagcagcggtttccagtattcatgtaagatttcgatcacaggtcagccctcttcacacccacggagtagcggcgctcaaggaacagcagcacaccattggaaacagtggtgaaaaccaggtaaatcacgccacagacgatggcgaaatagaacggttcccaggtacttttgcctgccagttgggtggctttgaccacatcttccaggccgagtaagctaaccagtgcggtagatttgaggatcacctgccagttgttgccaatgcctggcagggcgtaacgcatcatgctcggaaacatgatccgccgaaacacttgcccacgagtaaaaccgaacgccgtcgccgcctctatatgtcctttcggcactgccataaaagcaccacggaacgtttcggtaaaataagcaccgtagataaaaccgagagtgataataccagcgaccatcggatcgatatcaatctgcccgacgcccatcgcctccgtcaccgtgtttagcgcaatctgcaaaccgtagaaaatcagcagcatcaacactaagtccggcacgccacgaatcagcgtggtgtacccttcgaaaatcagcccgctaagccgattttggctgagcttaccgccagcgccaattaaaccgatgattacagcgagcactacagagctgatagccagctccagcgtgacgagcgcaccctgtaaaataacaccactaaacccatacaacatgctgcctgtcctgtcgtgtgtggtgaattaccgcctcttgtctccctccggttacccgaagggagcgggctttctttcaccgatggcgattagccaccataaacatcaaaatcgaagtactttttcgctaatttctcgtaagtaccgtcagcgcgcatttcggcaaaggctttgttcagtgcttcgcgcagttcgttatcttctttacgcaggcccatgccggtccctacgccaaacagtttttcatctttaacagacgggccaccgaatttgtaatctttaccgacaggttgtttgaggaaaccttcgctggcagcgacctcatcctggaacgcggcatcaatacgtccggcagtcaggtcagaataaatgttgtcctgcccctgatagctgacgatttcaatgccttttggtgcccaatgttcattaccgaacgtctcctgggtggtgccctgcaatacgcctacccgtttgcctttcaggctctcgactgtcggctgaatgtcagaatttttcgccaccaccaaacgagaatcggcagcgtacagtttgtcggtgaaggctatttcttgctgacgtttttccgtaatggaaaggctactcatgatggcgtcaatcttcttcgcttttaaggacgggattaacgcatccagcggattttcgacaaacgtacattgcgtattgatgcgtttgcataattcctttgccagatcgatatcgaagccaaccagttcgccttgactatttttactttcaaatggcgcataggtcgggtcggtaccgatgcggatgttttgcggaatcgcagcaaacgccgcagttgcgctggagaaggccagaaccagagagaggcttagcaccagttttttcataatgtcctcaactgacagtctttttatagggaatatttacaggtttgttacacttatcgtgccataaaattgaccatcaaggcaaaatatcccgccccgttagacgtattatttttcattaaaaatgcttaagtatgcatttcaatgcaccacgatagtgcaacaaacctggcgtgcaccatgatgatcattccatcaggtacagcttcccagcgacgtatcagtcaccgtagacattaaagtcgaaatactttttcgccatcttgtcgtaggtgccgtcctgacgcagctcgccaagcgccttattgaaggcagccgtcagttcagcatcatctttacgtagccctacaccggtgccatcaccgaagtattttttgtcttttacactactgccagcaaaggcgaaatctttaccagcaggttgcttgaggaatccttcgctggcagcaacttcatcttgtaacgcagcatccagacgtcctgcagccagatcggaatagaccaaatcctggttggcataggccaccacatccacgcctttactacgccaggtctcgttagcgtaagcttcctgggtacttccctgcagcacaccaacatgtttacctttcagactatccagcgttggctgaatcggactacctttggccgcaatcaaacgagaatctgcggcgtacagcttgtcggagaaggcaatctcctgctgacgtttatcggtaatggaaaggctgctaataatagcgtcgatttttttcgctttcagactggggatcagcgcgtcaaagtcactggcaacccaggtacatttcacctgcatccgtttgcacatctcgttaccgagatcgatatcaaagccaacaaaatcacctttagcatctttgctactgaacggtgcgtaggtggtatcggttccgatacgtaccgtctccggtagcgccgcatagctggaagccgctgtggagagaccgactaacaaagacagagcgagaatgctcttcttcatacataaccctcaagtgaaaatggcttttttatgttgtgtattgtgttgtgtgtttgcaggctctttcatgcaggtcttatgccatcttgacgacaacagtaacattcaacgttaaatatgttaataagacgttgcattattgtcctgaagttgaagatagcaggtatagcggttgaatcgcagcgtttcgattgaatggcagaaacaaaatgtcgaggatttgatcgcggttgcaaaattgccctgaaacagggcaacagcggagttatgcgccctgccagcgggcaaagagatcttcaggaagggttatcgcaaactggtcaagaacacgattaaccgtctgatttatcacatcatcaagggattgcgggcgatgataaaacgccggaacgggaggcataatcaccgcaccgatttctgccgcctgagtcattaaacgcagatggcctaagtgcaatggtgtttcacgcacgcagagcaccaacgggcgacgctctttcagcaccacatctgccgcacgggtcagtaagccatcagtatagctatggacaatgccggaaagggttttgatactacagggtaaaatcaccatccccagcgtctggaaagaaccggaagagatgctggcggcaatatcgcgcgcatcgtgcgtgacatcggctaatgcctgcacttcgcgcagagaaaaatccgtttcgagggataaggtctggcgcgctgcctggctcatcaccagatgcgtttcgatatctgtgacatcgcgcagaacctgtaataagcgcacgccataaatcgcgccgctggcaccgctgatgcctacaatgagtcgtttcataaatagttgccctgtcagacttgcaggcagactttgcaggatttcggcgggagttgcaagtcagggtgccagaccggcaccctcagcgaaggcatcatccttcgttatgcatttcgagattttccacttcgttctgacgttgcactgctttggcgtcatcattacgtaacgtatcgaggaaatcgaggtagccctgatcaacatctttggtgacgtagacgccgttgaacacgctgcattcaaactgctggatatccggattttcagcgcgaacggcgtcgatcagatcgttcagatcctggaaaatcaacccgtcagcaccgatgatctggcgaatttcatcaacttcgcgaccgtgagcgatcagttccgtggcgctcggcatatcaataccataaacgttcgggaagcgaatttccggtgccgcagaagcgaggtacactttcttcgctccggcttcgcgtgccatctcgataatctgctcagaagtggtgccacggacgatggagtcgtcgaccagcaggacgtttttatcgcggaactcggcgcggttggcattcagtttacggcgcacggacttacgacgcagctgctggcccggcatgataaaggtgcggccaacatagcggtttttaacgaagccctggcggtacggtttgcccagaatacgagcaatttccagcgcgatatcacagctggtttctgggatcgggatcaccacgtcgatatccagatcttcccattcgcgggcaattttctcgcccagtttcgtgcccatattcacacgcgcgctgtaaacggaaattttgtcgataaagctgtccgggcgggcaaagtatacatactcaaacaggcacggattgctgaccggattgtcagcacattgacgggtaaacaactgcccttcttcagtgatgtaaatcgcttcgcccggcgcgacgtcacgcaggaaatcaaagcccagcgtatcgagcgctacgctttcggaagcgaccatatattctgtacggttctcgtcaatatcacgttttcccagtaccagcggacgaatcccgtttggatcgcggaaagcaaccataccgtggccgataatcatcgccacacaggcatacgcgccgcggattaagcggtttgtggcagcaatggcagcgaaaatattgtcggcttccagcgggtagtggcggaagttgtccagctcgctggcgaagatattaagcagaatttcgctgtcggaagtggtgttgatgtggcggcgtttttcttcaaacagttttttacgcaactcgtgagcgttggtcagattgccgttgtgggcaagcgtaatgccatacggggagttaacgtaaaacggctgcgcttcagaggcgctggagctgccagccgtggggtaacgcacatgaccaatgcccatattgccctgcaaacgctgcatatggcgagcttcaaatacatcgctcaccagcccgttcgctttacgcaaacggaagcagttattggcatctatggtgatgatgccggcggcatcctgaccgcgatgctgaagcaccgttaaggcatcataaatgctctggttaaccggcataacaccggcgataccgacaataccgcacatacgtctttttcctcgttaagccacatctcagagcacttacgctctgggcaagaaactactgctgctttgcagataatcaaaaaaacatctgatgataaaactgaattgcgggatcagctgacttttgctccagtcttcgcttttgctcaccccggtaaaggagtcgagaaagaagagaatggcagcaacaatcaacacaccgcgcaacgcaccgaaacagacgcccagcacccgatcggtgccactcaaccccgttttctccaccaactggcctatcacgaagttcacgatagcaccaacgatcagggtagcgataaacagtaccgcgatggcaatcccatttcgaaccagttcgtcttcaaagcccgtaaaccagacactcaggtaagtgtagtaatgactggcaacaaagaaagcacaaccccatgtcaccaggcttaacgcttcacgaacaaagccgcggatcaggctaaccagagaggaaaaagcaatcaccgcgattatggcgtaatcaatccagaccatatgtgtcccacgattttacgccctgtcatcctgttcggggcgcattctaacagaaaaagaaaacgtttgcgtagggatttccttcccgcgcatcaataaaaatggcgctgaaaaaatattcaacgccatcgactttttatgcctttgcggcatcgggcaatgcgtgtcggatgcggcgtaaacgccttatccgacctacggttctacccctgcgtaggcctgataagacgcgccagcgtcgcatcaggcaagaccgtattaattcggcgtatagcccattaccacgccacttaagccagaaagttgcttcaactcacccaggctacctttcagcttatctttgctggcatccggcccaaccagaatacgggtaattttaccctgcactggcgtggatgggctcgtataaacccgataaccggcaccgcgcagcttaccgacaatctcattcactttatcggcatttttcagcgcacccagttgcacaacataggctttacccgtcggtgcagctttttcttccacgaccggcttcggttctggcttcggcgcaggtggtgcttcaacctttggtttaggcggctccaccggtttcggcttcggtggggcgaccggtgcaggttccggttcaaactcggtgttattggctgcaatagtggccggatcgaggctcggtgctgcggcatcacctgcccgcacctcttccgctgcgccttccggcggctgcgtcggtaacgcctgggtggcggctggcatcatatcaggctcatcacgatcgcccgctttcggcaccagcgggatagccgcgaactcatcctgataatgttttttctgcccgtccagcagccctggaagtacaatcacccccagcgccaccagcacgatcgtgcccactaaccgattctgaaacttacttgccaccgcttctcctcgcgtcaatcacttccatgacatgtgcgaccgtgtggaaagaaccacacaccagcacggtgtcttccgctttagcgtccgccattgcggcatcccatgcctgcgcaacgctatcaaaacttttgccgttacccaaatgctcaagcagttgttctgccgtggcaccgcgcggcccttccagtggcgcacaataccagtcatcaaccacgcttttcaaccaggccagagttccggcaatatctttatcatgtagcataccgataaccgccagcacgcgcccgtttttcggtagcgctttcatacgcccggtgagatattccgccgcatgtggattatgcgcgacatcaaaaataacgcgtgggctctcgctcacaatctggaaacgtcccggcaaaattgcgctggcaatcccgtcgcgaatggcattttcactgacttccagcccgctggcacgcagtgccgccagcgctgttgcggcattcggttgcgggacaagcggcaacggcagattttccagcgtgccgtgagcatcgctaaacgcccagtcatgatcggtgacggaatagttccactcaacgccccgacgttgtaacagtgcacctttttcctgcgccacatcagcaatggtagaaggcatttccggctcaccgacaattgccggtttttcgctgcggaagatgcctgctttctcgcgaccaatactttcgcgatctggacccagccagtcggtatgatccagcgcaatactggttactaccgcgacatcggcgtcgacaatattggttgcgtccagacgaccgcccagccctacttccagaatcaccacgtcaagttgtgcctgcttgaacagccacaacgcgctcagcgtaccgtactcgaaataggtcagggaaatatcaccgcgtgcgctttcaatctccgcaaaagaggcggtgtgggcgctttccggcaattcctggccctgcacacgtacgcgctcggtataacgcaccagatgagggctactgtagacgcccactttgtaccctgccgccatcagaatgctctccagcgtacggcaggtggtgcctttgccattcgtacccgcaacggtaaacacaaatggcgctggtttcaggacgccaagacgcgccgcgaccaggctcacgcgctcaaggccgagatcgatagttttactgtgcaggttttccagataagaaagccagctagccagagggctcgcggcttgaggagtgcgtttgataatcatggtatccgctgattcgttacggtgagaatagcaaaagggcagagccagtggccctgcccttatcagttatcaggcctcaggttcctgatccggtaccgggggtaccactacgccttcacgcggcgcttcaggattcggcgctggcagattcatcaacttcgccagaatgctcgccagtttcaggcgcatttccggacgacggacgatcatgtcgatcgcgcctttctcgatcaggaattcactgcgctggaatccaggcggcagtttttcgcgaacggtctgttcgataacacgcggaccggcaaagccgattaacgctttcggttcagcgatgttgagatcgcccagcatggcgaaacttgcagaaacaccgcccatcgtcgggtcggtcagcacggagatgtacggcaagccgcgctcctgcatttttgccagtgccgcagaggttttcgccatctgcatcaggctcatcagtgcttcctgcatacgtgcgccaccagaggcggagaagcagatcagcgggcagttatcttccagcgcctgctcaacggcacgcacgaaacgtgcacccacaacagaccccatactaccgcccataaaggcgaactcgaatgccgcagcgacaaccggcattccatacagagtgcctttcatcaccaccagcgcatctttttcgccggtttctttctgcgcagatgccagacggtctttatacttcttggagtcacgaaacttcagcacatctttcggctcaagctcgctacccagctccacaaggcttccttcatctaacaggctatgcaggcgattacgcgctgtcatacgcatgtgatggtcacacttcggacagacctcaagattacgttccagctcagcgcggtataaaacctgaccgcagctatcacacttagtccacaccccttcaggaatgctcgccttgcgggtgggagtaatgttgcttttaattcgttcaatccagctcattagggacctttctgtctgaacctggttcgatgccagttttatctttggggacgcataatgccatttttgcccccaacagaccatgaatgttgcacattaaaacataacagcccgaaactttggataaaaaagtggtcgaaccgcggagttactttttattttgcggcgcgtgccgcagcgcgtttgtgacggattatttcgatgacgcccggcaaaatagaaaccacaataatcccgacgatcagcagcttaaggttatcctgaaccatcgggattgtaccgaagaaatagcctgcgtaggtaaaaagcagtacccacaacagtgcgccgatcacgttataagcggcgaaatgacggtagctcatgtggcccattcccgcaacaaacggggcgaacgttctgacgatcggcacaaaacgggcgagaataatcgttttgccgccatgtttctcataaaactgatgggttttgtcgagataactgcgacggaaaattttgctattgggattactgaacaacttttcaccgaacaaccgcccgatagtgtaattgaccgcgtcacccacaatcgcggcgatcagcatcagcaccaccatcatatggacgttgagatcgttggtttccagacttgccaacgctccggcaacaaacagcaaactatcacccggtaaaaacggcgttaccaccagaccggtttcacagaacaaaattaagaacaaaatggcataaacccagacgccgtactccgcgaccagctctgccagatgcacgtcaatgtgcaggataaaatcgatgaggaaataaatcaggtccatatttgcctatgccttgtactcgtcatctttcaggctgtaactacgttggctacagcctgaaatgttccgagcattattctcgttagtccgccagaaatagcgggcccattggcggttttggaagatcataccggtcagggtaatccaccgcgaccagatacagcccttccgcttttgccgttgctgccgccagcgttctgtcctttgccgccagcaactctgctatccagctctccggctggttgtgggcaccgacttccatcaggctgccgacaatattcctgaccatatgatgtacaaaagcattcgctttaatatctaccaccacataaggaccgtgacgcgtgacattaatatgcataacgttgcgccacggggttcgggactggcactgcaccgcacggaagctggtgaaatcattctcgcccagcaagcattgcgcagcccgatgcatccgttcagcgtccagcggttcgtaaaaatgggttacccctttactcagtaccgccgggcgcagccgatgattgtagatgatgtagcgataacggcgagccgtggcgctaaatcgggcatgaaaatcatcaggtacagttttaacccaacgcacagcgatgtcaccaggtaaattcgcatttacgcccaaggtccacgccgcgtctttgcgcagcgcggttgtttcgaaatgcacaacctgcccggtaccgtgtacccctgcgtcagtacgcccggcgcagaagacggtgatgggttcgttcgccacctgggagagcgccttttccagcttctcctgcacactgcggacttcgttctgccgttgccagccgtaatacttactgccgtcgtactcaatgcccagcgcaattttataaactggcggttgttgctggtcggacattagtacagatactcctgcaccagtttctcggcgatttttactgccatcagcgcgccgccaaagcgaacgttatcggccacgctccagaactggacttgctccggcataccgtagtcattacgcacgcagccaacagaaagatgcggcgtaccgctagcatcacctacctgagttgggaattcgttctcttcagagagcacaatatcttcgccttgaacaaacgcatcacgcgcttcttctgctgccagtggacgcagagcttcaaagttgaccatctgggcatgaccgtagaataccggtgcctggacgacgctagcgctaatcatcagcccttcgtcctgcaggattttgcgtacttcgtcaacgatacgacgttcttcacgcacgctaccttcgctatccggcagtaacggcagcatgttgaacgccagctgacgcccgaagaaatcttcttcgtcaatcggaatgccgttgagcaatttcgcactctgccccgctaacgcatcgaccgcttttttgccctgggcggaggcactaatcaggctggtaacgctgatacgacttaaaccgccctgatcgattaacggtttcagtgccgccagcagctggctggtcagactgtctggtacggcgatgacattccggttccggtaatctgtcagtacaaacgggtttacttccggcaccaccagcggtacgtcgggttcgagagcaaacaatccactgctgtcgatcaccaggcaaccactgttggtcgcttcttcaacccaggcagcggtagcttctttgcctgcgacaaaaaatgccagctgcgcctgcgtccagtcgaattcagcggcatcctgcacggtgattgtcttaccaccaaagcgcagttgttcgcctgcgctttcgttacgtgccagtgcataaatttccccaaccgggaactgacgttcagccagcgtttcaagcagggcttcgcccacagcgccagttgcgcccaggacggcaatgttccagccttcagacatggtggtttactccagaaatagcaaagctccctgccaatgttacagcagagagcatgaagaagagattaacgtgccggatgatgaacggcgttaaaacccagtttacacagcaaacttgccgcactggcgtcatcacaaattacatacagagaactccattcacggcgctcaagatagtttttgcgcagtttatcgaactcacccggtatcccggcgactttacgcagcggtgcgtcatcgcggcgcacatcatacaccaaatgcaccagccttttcagcgtcggttgatcgagcgggccatgcagcgtaatgcgaccaaactctggcgcaggcagtaatgtatccagcgcaacgtgctgttcatgcccaataaacttgctataagcttcaaacacttgcgtagtaccgcgtgctttaccttccagggtatagcctgcgatatggctcgtgccgatatccacttttttcagcagctcgacgttgagttccggttcgccttcccagacatccagcactacgcttaacttctggccttcattcaggcaggtcagcaacgcagtattatcgacgactgcgccacggcaggcgttaatcagaatcgctccgggcttcaggctacggatcagtttttcatccgccagatgtagcgttttgtacggaccatctttaaagagtggcgtatggaaagtcagaatatccgcgcgctggactaactcatccaggctgcggaaatcaccctcatccccacggtcggcgcgaggcggatcgcaaagtaaggttttaatccctaacgcttccagtcgcgcctgcaatcgacgtccaacgttaccaacgcccacgatccccaccgtacggtcgtacagactaaatccatcgcgttcggcaagcatcagcagggaggagaaaacatattccaccaccgcaatcgcattacagccaggtgcagcggaaaaaccaattcccgcctgcttcaaccatgcttcatcgacatggtcggtccccgcagtggcagtgccaacaaatttaatgggttttcctgccagcaaagattcattcactttcgtgacgctacgcaccatcagcgcatccgcgtctgccagttgagcgacggggattggacgcccgggaaccgcggtcacctcacccaaacggctaaataagtcgcgggcataaggcatattttcatcaacaaggattttcacgtttgtgttacctgtatgagacgagagttaaccggacaagtgtgccataatctcgcggccaggcatacttgcgaagatttcaggtataaggatacgtaatgatacaacctatttccggccctcctcctgggcaaccaccaggtcagggagataatctgccgtctggcacgggcaatcagcctttatccagtcagcaacgtactagcctggaaagcttaatgacgaaagtgaccagtctgacgcaacagcaaagagcagaactgtgggcgggtatcaggcacgatattggtctgagcggagatagtccgctgcttagccgtcacttccctgccgctgagcataatctggcgcaacgtctgctggccgcgcaaaaaagccattctgcccgccagcttttagcgcaattaggggagtatttacgtctggggaataatcgtcaggcggtcacggattatatccgtcataactttggtcagacgccgctgaatcagctcagtccggagcaattaaaaaccattctcaccctgttgcaggaagggaagatggttattccgcaaccacagcagcgcgaggcgaccgaccgtcctttattaccggcggagcacaatgcgctaaaacagctggtgaccaaacttgcggcggcaacgggggaacccagcaaacagatctggcaaagcatgctggaactttccggggtgaaagatggcgagttaattccagcgaaactgtttaaccatctggtgacctggctacaggcgcgtcagacgctaagccagcaaaatacgccgacgctggaaagtctacagatgacgctaaaacaacctttagatgccagtgaactggcggcgttaagcgcatatatccagcaaaaatatggtctttctgcgcaaagtagcctttcttctgcccaggccgaggatattcttaatcagctttatcaacggcgggttaaagggattgatccgcgtgttatgcaaccgctgcttaatccttttccaccgatgatggacacgttgcaaaatatggcaacgcgtcccgcgctgtggatactgttagtcgcgattatcctgatgctggtctggctggttcgttaaccccgacgaaaactcagtatcgtgacaataatacccagcaccgcagagatcgccccggcaagaaatacgctagagtaaccaaacgtggtcgccagcattcccgccagcggcccggagacgccgagggcgatatcctgaaacgcggcgtaaccgcccagtgcggtgccgcgaacttgactggggacgcgtttaaccacctccacgcccagcgcaggaaagataaggctacatccggctccggttaacgccgcgcccgctaatgcgacccatgcacctggggcttgccagagcagcaacaagcccaccgtttctacaagcagagagacaatcgccactttcacgccgccaaaacggtccggcatccagccaaacatgacgcgcatcacgacaaatgcgccgccaaacgcggtaagagtaaagcccgccatcgcccatcctttgctggcaaagtagaggctaacgaaagtcccgataacagcaaaaccaacgccttgtagtgccagacctaaccctggtttccagataagcccgacaacgctccacaggcttggacgttctcccgccagggccggtactttgcgcactgtgccgttacaggcccacgccagtacgggtaataccattgtggtgatcgccagtgcggcaaaaccgtaatggctatgaatcaacaggccaagcggagcaccaacagcgagggcaccgtaaatcgccattccgttccaactcatcactttgccagagtgttttggccctacgatgcctagtccccaggtcagagcgcctgtcagtaactggctttcaccaaagccaagaatcaaacgcccgacgaccaacagagcaaatttgaacggtgcggagacaggcaaaatcgccgccagcagcaacgcgccgccagccagaccacaagctaacattccctgaagcgcgctacgttttgcaccatattgatcggccagtcgcccggcgtaaccacgcgtcagcaccgtagccagaaactgaatcccgacggcaatgccgaccatggtattgccatagcccagttcatgatgaacaaacagcgggataaccggcaacggcaaccctacggtcatgtaggtgagaaaaaccgcaaaagcgatgcggaagaggctaaaattggcagaagatcgtgtttcggtttggcttacagcagtcatgcattactccagaatgcagcgcaaggcgaggagtatccccgtctcatctctctggtttcagggttacggtgcgttggcaggatttaacgcgtacgtcttttcagaaggaaatcgacaaagcgggaagtttgcctggaactggcggcgattgtcaatgatgtgaaaaagggaaccatcaggttcccttttgcgttagtgccggaggccgcattggcgcgtaacgtcggatgcgacgctggcgcgtctactccgacctactgcgaattaatctttcagcttgcgcattaccagcgtggcgttggtgccgccgaagccgaagctgttagacataacggtggtcagttcgcgatcggtcgtttcggtcacgatgttcagacccgcagcctgctcgtccagctcttcaatgttgatgctcggggcgataaagccgtgttccagcatcagcagagagtagatagcttcctgtacgccagcagcgcccagagagtgaccggtcatggctttggttgcagaaatcgccgggctcttatcgccgaacacttcacggatagctgccagctctttcacgtcgccaaccggagtgctagtaccgtgggagttcaggtaatcgattggggtatcaacgccatgcatcgccatcttcatgcagcgtactgcgccttcgccagacggagcaaccatgtctgcaccatcagaggttgcgccgtagccaacgatttcagcatagatgtgagcaccacgcgccagcgcgtgttccagctcttcaaccactaccataccgccgccgccagcgataacgaaaccgtcacggtgagcgtcgtaagtacgggaggctttttccggggtgtcgttgtatttagtagacagcgcacccattgcgtcgaattcgcaagccatttcccagcacagctcttcgccgccgccagcaaacacgatgtcctgtttgcccagttggatctgctctactgcgttaccgatacagtgtgcggaagtcgcacacgcggagctgatggagtagttaacgccatgaattttaaacggggtggcgaggcaggcagaaacgccggatgccatcgctttggtgaccacatacgggccaaccgctttcaggccgcgcgggccgcgcattgcgtcagcgccgaacacctggaaacgcggggagccgccgccggaacctgcaatcaggccaacgcgcgggttattctggtaagcttccggagagaggcccgcatcagcgattgcctgctccatagaaaggaatgcataaatggatgcgtcgctcataaagcgcacaactttgcggtcaatgaggccagtggtatccagttttacgttgccccagacgtggctacgcatgccggaatccttcagctcctgagagaaagtgatcccactacgtccttcacgcagagatgccaggacttcctgctggttattaccgatgctggaaacaatgcccaggccagtaatcactgcacgtttcattcaatacctctgtaagtcgcacatagagtaagtttcgaatgcacaatagcgtacacttgtacgccgaacaagtccgatcagccatttaatagagaaatttgcgcagccttacacacatcgctaagatcgagccaccgcctgtaagacgagtaacttacgtgaaacactactccatacaacctgccaacctcgaatttaatgctgagggtacacctgtttcccgagattttgacgatgtctatttttccaacgataacgggctggaagagacgcgttatgtttttctgggaggcaaccaattagaggtacgctttcctgagcatccacatcctctgtttgtggtagcagagagcggcttcggcaccggattaaacttcctgacgctatggcaggcatttgatcagtttcgcgaagcgcatccgcaagcgcaattacaacgcttacatttcattagttttgagaaatttcccctcacccgtgcggatttagccttagcgcatcaacactggccggaactggctccgtgggcagaacaacttcaggcgcagtggccaatgcccttgcccggttgccatcgtttattgctcgatgaaggccgcgtgacgctggatttatggtttggcgatattaacgaactgaccagccaactggacgatagcctaaatcaaaaagtagatgcctggtttctggacggctttgcgccagcgaaaaacccggatatgtggacgcaaaatctgtttaacgccatggcaaggttggcgcgtccgggcggcacgctggcgacatttacgtctgccggttttgtccgccgcggtttgcaggacgccggattcacgatgcaaaaacgtaagggctttgggcgcaaacgggaaatgctttgcggggtgatggaacagacattaccgctcccctgctccgcgccgtggtttaaccgcacgggcagcagcaaacgggaagcggcgattatcggcggtggtattgccagcgcgttgttgagcctggcgctattacggcgcggctggcaggtaacgctttattgcgcggatgaggcccccgcactgggtgcttccggcaatcgccagggggcgctgtatccgttattaagcaaacacgatgaggcgctaaaccgctttttctctaatgcgtttacttttgctcgtcggttttacgaccaattacccgttaaatttgatcatgactggtgcggcgtcacgcagttaggctgggatgagaaaagccagcataaaatcgcacagatgttgagtatggatttacccgcagaactggctgtagccgttgaggcaaatgcggttgaacaaattacgggcgttgcgacaaattgcagcggcattacttatccgcaaggtggttggctgtgcccagcagaactgacccgtaatgtgctggaactggcgcaacagcagggtttgcagatttattatcaatatcagttacagaatttatcccgtaaggatgactgttggttgttgaattttgcaggagatcagcaagcaacacacagcgtagtggtactggcgaacgggcatcaaatcagccgattcagccaaacgagcactctcccggtgtatagcgttgccgggcaggtcagccatattccgacaacgccggaattggcagagctgaagcaggtgctgtgctatgacggttatctcacgccacaaaatccggcgaatcaacatcattgtattggtgccagttatcatcgcggcagcgaagatacggcgtacagtgaggacgatcagcagcagaatcgccagcggttgattgattgtttcccgcaggcacagtgggcaaaagaggttgatgtcagtgataaagaggcgcgctgcggtgtgcgttgtgccacccgcgatcatctgccaatggtaggcaatgttcccgattatgaggcaacactcgtggaatatgcgagcttggcggagcagaaagatgaggcggtaagcgcgccggtttttgacgatctctttatgtttgcggctttaggttctcgcggtttgtgttctgccccgctgtgtgccgagattctggcggcgcagatgagcgacgaaccgattccgatggatgccagtacgctggcggcgttaaacccgaatcggttatgggtgcggaaattgttgaagggtaaagcggttaaggcggggtaatctgctctcgcagtgtttgccggatgcggcgtgaacgccttatccgacctacgtgtgacgtgtaggcctgataagacgcgataagcgtcgcatcaggcatgctgctccagacgccgcaacttactgctgactcgcctgctgaaacaggttttcccacatatcggtcaccagcgcctggtcacgcgggctcaattcaccagcaccaatggctttttccagactctggctaacggtcgtatgcaccgcctgagcggagtggtcatcaccactttccagttctgcgatggctaatgtcaggtggccacgcaaatacccactggcaaacaactcatcatcactggcatggtcaaccataccgtcgattaatgccagaatgcgactttcaaactccgcgatcatcttctttcctcattgtaaaacgtggcgctggcttcagttgagcgcttccggccacgggaactgttccgccgtaagttccggcgtgtgataataattttgtagtgctttaatgaagcgtgccggacgttccggaatgccatttgtcagataatccatcacctgcgcatgtactcgccgttgaaacaccacacgatccggttcgaaatccccttccagattgtcgcaactgacgttaaacggatatcccgccgccacacagaacaaccagtcgagcgcctgcggcttcacttcaacatcttcaaactggctttgcgtttgggcatcgcgtccgtccgggcaataccagtagccgaaatcaaccagctcacggcgcgctttcccggcaatacaccagtggctaatctcatgaattgcgctggcataaaagccatgagcaaagacgattcggttatacggtacttccgcatcagcaggaagatagatcggttcgtcgtcgcctttaatcagacgggtattaaaatcatcggcaaagcagctattaaaaatttcaatcaactgctcgtagtggtgtgtactgttcattagttcatccccaaccagtggaggatctcctgtccgtggctgtcgtaaagtaatttggcactcatcaccgcgctgacgataacaatcatcgggcggatcagcttttgtcctttgctcaacaccagtcgactacccatgcgcgcgccgaggaactgccccaccagcatgacaaagcccgtcgcccaaatcactttgccgccgagaataaacagcagtaaaccgccgatgttactcgttgcgttgagtaatttggcgtgagccgtggctttggcgaggttaaatccgcacagcgtaacgaaggccagcgcgtaaaagctcccggcagccgggccaaagaatccatcataaaaaccgacgcagccaccggctattaacgcgaagggtaaaccgtacatccggcgctggcggtcttcttcacctagctttggcatcagcaagaaatagaggccgatacaaattaccagaatgggcaaaatctgccgtaagacatcagcctgaacgtattgcaccagcagtgcgccgctcatactgccgacaaaggtcatggcgatattgagtttctgatcgcttaaactaaccactttgcggcgaataaagtagatagtagcggaaatagagccgccgcaggcttgcagtttattggttgccagcgcattagcgggagacatccccgctgccatcaatgccggaatggtgagtaacccaccgccaccggcaatgctgtcgataaatcccgccagcatggcgacaaaaaagagaactcccagcaacagcggggaaaccataaacaggctattaaacgtttccattagatcacgtgctcatccagtagcgcctggcaggaaggcggcaacggaggcggtgtcttcttctcaggctttgttgttcccggttttggaggttcaaaccagctttgcagttctgccccgcaaccatcgccacttggcggtaaaggttgatcttcacactccagactatcggcagggcaacgtaatcgtacatgcatatgcgcgcgatgctggaaccagggtcgcactttgcgcaaccagtcgcgatcggtgcccgcatcaaggcaaagttgttgtttaatcgccggattaacaaaaatgcgcgtgacgtctttgtcctgggcggcgagtttgatcaagctgaaaatttctggcttccacagcgtggagacaacgtgtttaccgtcgcgggaaactaagtccagtgcttgcgggcgcaagagctgcgcggaggtccagcgagttttcggcagttgcagaaagatatcgacatccagtccggtctggtggctggcatgaccgccgttgaaacgcccaccagcgggcatccccatatcgccaatcagcaccgtacccatgcccagattgctcacctggctactcagacgctggataaacatcaccagatccgggtgaccgaaatagcgacgctgatcggtacgcatgacctgataatgttcggactgtatcggcagcgtgtcagcgccgacaatacagccattagaaaaactgcctatgctttgtgcgctacccggcacaggttgggttattttttgccacggcgtcgctgccaggctggcgctactggcaagcagagccagcagcgcaatcgcggttttattcattttttaccagcgtggaatatcagtcttcacatcggcattttgcgcccgttgccgtaacaggtgatccattaaaacgatcgccagcatcgcttctgcgatcggcactgcgcggatcccgacacagggatcgtgacggcctttggtgatcatctcaacttcttcgccaaagcggttaatggtacgacccggcacggtaatgctggaggtcggtttcagcgccatatgggcaatgatttgctgcccgctgctgataccgccgagaatgccgcccgcatggttgctctggaaaccgtctttggtgatttcatcgcggttctggctgccgcgcagcgccaccacgtcaaagccgtcgccaatttccacgcctttcaccgcgttgatgctcatcagcgcatgggcgatgtcagcatccaggcggtcaaagaccggctcgccaagtccggcaggaacgccactggcaacaacggtgactttagcgccgatggagtcgccctcttttttcagcgcacgcatcaactcgtctaacgcgtcgattttgtcggggtccgggcaaaaaaacggattttgctcgacctggctccagtctttgatatccagcggaatgtcgcccatctgggtcaggcagccacggatttcaataccaaatttctcggcgagatattttttggcaatagctcctgccgccacgcgcatggcggtttcgcgggcggaagaacgtccaccgccgcgataatcgcgcagaccgtatttttgttcgtaggtgtaatcggcatggcctggacggaaaacgtccttaatcgcactgtaatcctgagagcgctggtcagtgttttcgatcaacaagccaatgctggtgccggtagtaacgccttcaaaaacaccggagagaattttgacctgatccggctcgcggcgctgggtggtatagcggcttgtcccagggcgacgacggtcgaggtcatgttgcaggtccgcttccgtcagcggaatgcctggcggaacaccatcgacgatgcagccgagcgccagcccgtggctttcgccgaaggtggttacgcgaaagagttgtccaattgtgtttccagccatcacggctccgttattgttgtgtttgcgtgtttacttaatctttataaatcgcgaaatgttctcgtgcggcaataagctgctctttggtgagcataaacacaccatcgccgccgttatcaaactccagccaggtgaacggaacatccggatattgttccataagatgtaccatgctgttgccgacttcacaaatcaacacgccatcatcagcaaggtaatctgccgcgttaccgagaatgcgacgcgtcagtttcaggccgtcagtgccagatgccaggcccagttccggctcgtggcggtattcgtttggcaggtcggacatatcttccgcatcgacatacggcgggttagtgacaatcaggtcgtactgcactttcggcaagtcgcggaacagatcggaacgaatcggaatgacgttgtggatcagaccgtgttcttcgatgttctgttcagcaaccgccagcgcgtctggagagatatccaccgcgtcgacttctgcatccgggaaggcataagcacaggcaatggcgatgcagccgctaccagtacacatatctaaaatatgctgcggttgcttgctgataagtccggcaaatttattgttgatcagttcaccaatcgggctgcgcggcaccagcacgcgttcatcgacgtaaaattcatggccgcagaaccacgctttgttggtcaggtaagccaccggaatgcgttcattgacgcggcggatcacgcgttcaacaatacggtgtttttcgctggaggtcagacgcgcggtgcgcatatcttccggaatatccagcggcaggtagaggctaggcaacaccagctgtacggcttcatcccacgggttatcggtaccgtgaccgtaccagatatttgccgcgctgaagcggctcacgctccagcgcaacatgtcctgaatggtttgcagctcatttactgcttcatcaacgaaaattttatccacgtattcctccagggcatgatcgcaataatttcggcggctagtttgccatgaagatgacgataaatcagcattcacgcgcggtgagtgaggaaaaatacgtttaaaacgatcgattgcgctacgagtcgggtaaactgtaggaaaattagaaatagagacagataaatgaaaaagaaaacaacacttagcgaggaggaccaggctctgtttcgccagttgatggcggggactcgcaagattaagcaggacacgattgtccaccgaccgcagcgtaaaaaaatcagcgaagtgccggtgaaacgcttgatccaggagcaggctgatgccagccattatttctccgatgagtttcagccgttattaaataccgaaggtccggtgaaatatgttcgcccggatgtcagccattttgaggcgaagaaactgcgccgtggcgattatagcccggagttgtttttggatttacacggtctgacgcagctgcaggccaagcaggaactgggggcgttgattgccgcctgccgccgtgaacatgtgttttgcgcctgcgtgatgcatgggcacgggaagcatattttgaagcaacaaacaccgctgtggctggcacaacatccgcatgtgatggcctttcatcaggcaccaaaagagtatggcggtgatgcggcgttgttggtgttgattgaagtcgaagagtggctgccgccggagttgccctgaggagttgagcgcgttgcgccaggtacgggtaatggcaggggcgaatgcccctgcctggtgtatctaagggttacaactcattcagtatgtactggaaccggcaagtagaatcgattggctgcatactgctggtatcaacacgcacgaccatatcgtgtaactgtttgtccgttatagggtgtcgatttggcgtgacgctgacttccgccttgtcacatccgctcgcggtaaaagttatcatctgtgcaacccagcggcagtaaccacctgtttcattcatctgcgtactgtcgcacaacttcccatctttcatcaaatacgtactaagcgttttctcaaccacaccgcccgtgctctgcagggtgagcagtttactcttactgacataattctcattccaactaacgtcataaggttgaacagaaacggatggacaaatcgtgtcgtgactatcaggcccctgatacgtcacgccccctggagaggcttcagagtcattcataataaccaaccatggacaagaaaagtaagattcaatctctgcagagacaataacctcaaatgtataatacccgcagttccacccagacggtaatccaggacaacttgctttgttgatattttgatggtagccaatcagcttaacgctaggggcaggaggaggaccactccagctcacattttgcaatatttccccagtcatgagccattgactacttttatattcaccaacgtacactgcggatggcatcattatttttaaattaaaagtcgcaatattacggctatcaccgttgtaaccgtagtaaacgtcaacgctatgcccggcagccatagcttctgtagtagcaataagcatgaccagagcgaacaaccatcgtagtattttcattttaaatatactcaaatgtcgcagttaaagaggcggtaaattcaccgatcgtcacatcacggccgcttttcgcctgtagccaggctctgaaattgatatcgttattgccattggttagcgcaaaggtcgccccatttgtattgttgatggcaacctgcattccgtcggttttttccatgccaattcccactccctgagcggtactactcgtatccagtgccagaaaaccgggttgttcgctgtcttctacccccgtgagcgtgacttttacgttgtatcccgccggccctttgcaatctttcagcttaaagactacgggtacacgagcggactggcctgcaacgttcaaatcctgacgactgaccgtgggaaagcgcacctctgccagatattggccatccaccaccagcgcacaggatttacttaataaattaccggagaaatgcagattattatctgccgcgaataacgtgctactcattgccaatatcagccccgctaacaggacgtaaccaccggactgaatcatacttttattcattgataatccacccgtaatgttgcgtaagcgctaaaattcgtatcgcttaacacagcatcactcgcttttaccggtacggcctccagcttcggcttttgcgtaaaatcagtggcgttgatagcaagcggagtattgagtttaaaacgctgaccatcgtgctgaagctcgataccaaaaccgggtacatcagtttcaattgctgcatcattaaaactggtttgtgtaccagtccaggtgagggtcatctcccaatctggatgacgggtcgtgctgtcacaagtgagttcatatggcacctctttacgaccatagttgccgttgatgtcgtcgataatgagatcgcgaaattcgacttcaatggttttaccaccgctgatgctacaggttggcggactcaataatgtcccgtgaaaggtgatgtcttcatcagcagcatgagctatggcgctactgacacaaagcagggttaagaaagtctttctcattgatagtccaccaccatggtcaaactggcgttaaactcgcccgcagcaagttgcgccccgcttgccttcacaggtacagccttcaactgtggctggttattgatattaaatggcgtccagctattttcaccgacggcaaacaaactgttatcggcgctattttctatccgaatgcccagcccggtgatattggtactgagtaccgtttcgccgttaatcgtactggtattgcccttaagttgcatccgcaagtcgttagcaagactgtttgtgcagttcaacgtgtatttcgcatcttgccgataattggtgccatcaacgttatcagcaatcatattgccgaactctacctggctgcccttgatactacagggtggcggagcatcgaccaacacgcgcagaattaaatccacgggtttactaccagccatagcagataaactacagacactgcataccagcagccctgcgcccactacaaacttttgactcataactccccccgtcatcagcctttgcggctctgctcttcatccacctggcagctgttgccattgcactggaagaacagcggcatccgtgcgccaaagtcgttgacgtaagtcagcaccggtacgctatccattttcacattcagcggtaccgtggttttcggctcaatgaccagagggctgaaccctgcagctggattaccgtttttctgcgcactggcgttgctgataatcacgtagtacggcgttgggttattgacggtaaatgcctgaccgctgcgggtgagcgtcaccttgtgctgccacggacttttcatactgaccttttccagcgcctttggtcgccagaacaacttgatacgcgtttgcagcgcgatttgcagggtattgggtttgttactttttggcgggatctcgcgcacgttaaagtagaacatgctttcacgatcggctggcaatttgttgatatccggcattccctgcacttttacctgcccgttcatcatactatcgatgcgttgcactggcggcagcacagttaacgggctggtgatcttgttacccttttcatcttcaatccagctttgagccagataagggagtttcggatcgttattacgcagcgtcacgctgatacttttgtcgctttcattaaatatcaaacgggtacgatctggcgttacagacgccagggcagacaaactggtagcgctaagcagtaacgccagcgtcatagcacccaatttggcagagcaaagtaaatcagacatggatcattccttaatcacgttattggttagcactaacagaaacagggggatcggtgggtgtcacctgttgcgtctgctcctgaatgacaggctttatgtcatcaggaacaaccggcgcgacgttgcctttatgctggcatggcagtaacaagccgttaaacagatcggcaggcagcgggtccggcaggttgatatcgcaatgcgcaacaccactccagaacacactcatatgttcgccaggtttcaccccagccagatagacactaccgtcatcatcgacaaggcccactgtctgctcgttatcattttttacttctgcgccaaacggtggatggctgccatcttgtaaacgcagcaccgccatcgctttttgaccactgatgacggcaaatttgcggtagccaatggctccttcagttagcgtggcttgcaccacgctctgggttgcttcggcgttttccggcaatttgttgaggtcgatatacgcctgattgcgataataattgttaacgtcagaaacgacggctttaccaaacatattggtataaacagcagccccgttaccttccaccggaacatcggcaacgccatcggcatcaatcagcaggcgtgtcccgcccatattctgggtacggtgaagtgcgccgccgtgggtagtaagcgttgcgccgccctgtaagctcaagcccgcagaggtgtattgcccttcatggtagttcgcactgaggtcaacctgcgccaggctaccatcatggctgtagtagccatcaacgctggtgtgtttgtcactggtgccgatgttcaactgatagtgagtcgcgtcatcgacacggctaaaataaccgacctggctgctgtccgtcccactgccatagttgccgttatagctaacggtactgttgtcgccccacggcatactgagcgaaatttacatgcccttatccgcccggttgtcatactcgtagcggtagccagtcagggaaacgctcatattacgaatgctgcccatattgaaatagtgggagagcatgatgttgtagtttgtctgctcctcacgatcccagtaggtatggcgggtatagttgagataaacgctaacacccgcatcgcggaagttctggttataagtggcggtgtacatctctttgtcgttgcccgtacggaccatttcgctgtcactggcatccagatactcgctcatggtcataaagttctcttcgctgaagcgatatccagcgaaagtgacgcggctgttgagctggtcaaagtctttggaataactcacacggaaggagttaccgtccaggctacctttgccataagcggtgtctttatccagtttggtatggctatgagtaacatcaaacgcgaccgcgccgaaggtagacaaatcgcgaccgacgcccagcgccgcagactgatagttttcatcacccagcgcaccgccatataagctccagccgttagcgatgccccaggaggcttcagcaccagagaaaaatcccccctcgacatggtggccccactcttgcggacgtcccatcatgatcttatagcgaacctggcctgggcgagtgaggtatggcatgctggcggtgctgatgtcatattcctgcacctggccgttctgttcttcaatgcgaatatgcaacgtaccggagacggaatcaccaagatcctgaatacgaaacggtccagccggaacctgcgtttcgtaaatcacacgccccatctggctgacggtcacttttgctgtggtgtgtgccacgccggaaatgtctggcgcgtagccgcgcagattgggaggcaacatttgatcgtcagtgctgacactgccaccaacataattaaaaccgtcgaaaatatcggaattgaggtaatcttcgcccagcgccagtttggcttttaaactcggtaacgcccgccaggcataatagcgactccactcccattttttttgtgtgtcatcgccgccaaattcatcgtcatcatcattactgcgcgtatgttgatagttggtctgccagtcagcgcgcatacgccatggccccaggttaaccccgaccgtcccgttgccgctgatctcgttactgtcatcgccgccattttcttcgtgtcgtgtttgcgcagtgatgctgtagtccgcaatgatcccggagatgccatcatcccaacgagaaggtggatcccagtcgggccaggtatattcgaggtaagcctgcggtagactaatgactaatgcggactggcttaaatcagccttaatttccacgccttccagttgaccgggcttcaggcatttaccatcgtggctccattgcagatttttcgccacgtcttcttttaaaccaaactgcgccaccagttccggtgtcagacaagcatagcttttgctaacgtcatcttcaccagcataccagtaaatatcgtactcttccgccaatggctgtttatttagttgaacctgtaaattgtattttccgggctcaacatacccctggctggaaaaacgcttcagatcaatttttgtgtcgccttttaattccagaaaacgggaatcaaactgaatgtcgtcttcagcccagacactgctataactcccactcattgccagcgcaatgcaccacggaagaatccgtaatcgaaaaagagaatggtcaggcatacacgtttttatccgtttttattcttgttcggtcaaaatccatttaaataccccatagcagtgtcgctatgggggtatgccttacaggtaagtaatctggaaggtggtatttgcttcgaaattacccagatctggcgcatcagctgcgccgaccagccaggctttaaagttcagagtctgcttcgctttgcctttattagtggcagtatctttcacgattttctggtcaatacccatgccgcttttgtaagaggtacccagagagtcaccgatcgccaggctaacattgttaaatgccgcaccggtatcggtattgaaaatggtgtaataattgccgctatttgcagaagaaacggtaccagtaaaggtagtggtcattgtttcctgagtatcaaatacgcaatcttgcaggcgaatctggaaatttttcggcgtggtggtgccgttatttttcagtttttcggcaccgatatcacccatatcaacttccagtttgtgatcgtccggaacgatagaacacacactgtcttcaatggtgccgtaaaaacgtgcagtaccgttgttacccgcagcgattgttgccgtagaggtgaacgcgcccatcaccattgccgcagcaatagctgttttaacaaacttactcattatttgtccttaaactataaataattaaaatataaacattgcaatacattgattcagtcaatagccaatgtttatacccagccattgaatacggcatgcgatccaaaaaaacaggtcgtaaaaaatgtattcgttggtgtggggtcgaatagtgatgttttcactcccctgattcaatttaattttactaatgagtaaatgtagatttaattaatatattgataggggaaagattatcttaaggatcttctaaaaaaacacgaaatatatatttagaaaaaacaggaagcatatcaacaatgaatgccaatagcttaaaaaacaaacaatgaacatataatgcgattggcattaacccgcttttgtcgatataatatataaacactatagccagaatttaatcaagtttcaattacgtcctgcctgattattcaactctattttctccattatctgtattaataaatgataatgagtgtcaaacagacattattcatttcaacatgtaactttgggcaaaatcaagatacgcgcagaagaatactttccgaatgaaagttaaaggtgttttatttatagatggggagagtcttcgatagtagtgaggttgacagatatccgctgcctgatgagcaattatgcccaatgaatctacctcattgggcataatttggaactcatcagatagcttttgccatcttcagattacacgggctcatctgccagttgaatgtgccgtttccgctttcatcaagcgttacgctggcaatggcgctggtggtaaacataggcggcgtttcgcccggacataactcggcaaccagatacccgactaacggtaagtgagagatcaccagtacgctagcaacaccttcattggtcaacgcctgcaaataggcactgaccagaccaacatcgccgcagggcgttaactccggcagaacttctgcactggaaggcaggttcagacaatcccctacttcttccagtgtttgctcggctcgcaggaacgggctcaccagaacgcgttcgatttccactttttgacctttcagccagttcgccatcaggcgagattcgtcacaaccattagtggtcagaggacgaacggaatcactggcggcatcgagggctgcgtcgccgtgacgcatgataaaaacttgcatattgcaccgcttttgttaaccagattcgcccgttttctttcatctgaaaccagagaaagaaaacggtggccggcattgtgccttatccattcaccgaatgaaacgctgttttttacctcaatggcgtaagtatagtcaatatgcgtttacattttgaccaacactccgccattcagcgcggattcatatagctttgaccttcttattgcaggtcagttgcagttgttttccaaaaactttccccacgcgcgcccatctcgaccaaacgctcgcaaggggtaaaacgggaaccatactgcgtggcaagtcgttgcattattgcaaccacttcgcccgcgccgagagaatcgatatagcggaacggtccaccgagaaatggcggaaaaccaatgccaaataccgcgccaatatccccgtcacgcacgctacggataacctgctcatcaacacaacgtactgcttcattcagcatcaacatcacacaccgttcagcaacctgcggtgcggagattcgcccctgcccttgtgtgccaatcagcgggtaaatggcgggatcgacctgttttttgcttttacgccctttctgaccataaagatagaaaccccggccattttttctgcctttgcgatcgtcgttcaaaatactagaaacaacatttgcaggcgcgctaaaacgttctccataagcggcttccagtacaggaataattttagtcccggtgtcgattcctacctcatccaaaagttggattgggcctaccggaaaaccaaatttcactagcgcggcatcaatgtgctctacccgttcaccttgggtcaacatgcggatagcttcattaatgtaaggcgctaagatgcgattgacgtaaaaaccggctttgtcacgcacgacaattggcgttttaccctgttttttcgccagttttactgtggtagcgatggtttgcgcgcttgtccccgcatgaggaataatctccaccagcggcattttttccaccggactgaagaaatgcaggccgataacttgctcaggtcgcgtggcgtgagcggcgatatcaccaatcggtaaagaactcgtattgctagcaaagatggtatgagcggcgcaattttgctcaacttccgccaccatctgttgtttcaattcgagattttcaaacaccgcttcaataatcagatcgcgatgggcaaagccgcgatagtccgtcgttccggagattaatgccagctgtttgtcacgttcgctggctttgagatgacgacggcgaactttgccctccagctgatcccaactgtacttcagcgcatgatttatgccctgcgggttgatatctttaattctgaccggaatccccgctttacaagcagtgacataagcaataccgccgcccatcaagccaccacctaaaatccccacgctgtttaatggcgcaggcggcgcatcactgccgggatctttcttcacgtccgtactggcaaaaaagatactacgcagcgcctggctttgtggcgtcatcgccagttcgccaaacgcccgagcttcggcgtcataaccgctgctggtgccctgcgctaatcccgtttcaacaacctccaggatgcgttctgtcgccggataattgccttgagttttgtgttctgttttcttgccgaccattttgaacagcagcgcacgacctaacggccccgccagaatacgctcgcgtacaggtagagggcgggaagatgggcgctccttctttgccagctcaacagcggcttccagcagaatggagtgcggaacaacgtcatccaccagccccagctttaatgcctgtttcgcccgaagttgttttccggtgaggatcatctctaatgctgtgctgacgcctatcagacgcggtaaacgctgggtgccgccactaccgggtaacaatccaagttgtacttcaggcaaaccgagcaccgttttaggatcgtcagtacaaacgcgaccgtggcacgccagcgccaactccagcccaccacccaggcaagcgccatgaatagccgcgataacctgaatgggcaaagcatgaatctccgccatcaactgttggccctgccgcgccagagcttccgcttcttgcgccgttttgcagttgccgatcatgttgatgtctgcgccagcaatgaagttgtccggtttagcggagacaaacaccacgcctcgcaactctttgttttcacggagttgcttaataatggcgcgcacctggctggcaaactccgccttcagggtattcattttctcacccggtacgtcgatggtgataacggcaatgttgtccagacgaacattaagggtaaacgcacttgtcatttccattattccgcctccagaaccattgccgcgccaagcccaccggcagcacaggcggtaactaaaccaaatccaccgccgcgacggcgaagttcatgcaatgtctgggtaatcatccgcgcgccggtcgccgcgaagggatgcccgtaagcaatgctaccgccaagcacgttaaatttgctatcgtccacttcgccagtggcatgtgcacgccccagtgcttcacgagcaaaacgttcactacccagcaactgaatattcgccagcgtctgagctgcaaaggcttcgtgcatatcgatcaatgtcagatcgctcatcgtcaaaccggcacgctccagcgccagcggtgtactccaggctggaccgagcaacatgtcctgccagacatcaatcgcagtaaatgcgtagctgcgcagataccccagcggcaccagccctaattctttcgcccgggattcagtcatcaggatcaccgctgccgcgccatcggtcagcggcgtactgtttgccgccgttaccgttccgtgtttgcgatcaaacgccgggcgcagctttgcgtaatcggcaaggctggaattaccgcgaatattgttgtcttcgacaagcggttgtttataaggagggataaaggcagtcatcacctcttctttgagttttccgtcactccatgcctgagcggcacgctgatggctacggtgcgctaatgcatcttgctgttctcgggtgatgccgtaggttttcgccatttgctctgcggtgtcgcccatccgcaagccggtagaatattctgctaccgcaggtggtacgggcattaagtcgcgcaaacgcaggcgagagaagagtttcagtcgctggctcatggtacgagctttgttgacatcaaccagcacgcgcgccagttttttactgacgccaattggcaatacgctagaggaatctgccccaccggcaatccccgctcgaatagttcccgccatcaggctttctgcgacgtttgcaactgcctggaaactggtagcgcaagcgcggctgacgctgtaagcatcggtatgtacattcattcccgtaccgagaacaatttcacgcgcaatgttgggggcttcaggcatttgtacgacctgaccaaagaccagttgttcaatcacttcggcggggatctcgctgcgtgccagcagttcgcctaccaccatcttccctaaatcaaccgcgggaatgccatgaaaagccgtcgcctgacgggcaaaaggcgtacgtaaaccgctaacaatggcgatacgatcgccctggcgggtaaccagcggtaaaacctgacccataacactcccctgtaaaaaaataaataaagtggtctgacctgatcatagtcttaaccatttttttacatttagccaagtggagaaaagggaaagtgggagctatgacacagagagaaaagaagaagagaaaagaaaacgcccctgccagcaactgacaggggcgtacgtacccgagaggaattaacgcagacccagctggaaaatcagcatttcagcttcgcaggcaaaagtgaaatcgatatccaggcgcacaccgtcagactcttcagtgaaagtcggggtgattttgcaaggttcagattccacgctacgggctttttcagtcagcgccgccagcgtttgctctgcttctgcgcggtttgcaaacacgcggctgtaagacgcggtgcagtcggagttgtccataatggtgccaacatccatacagcagcaaaccggggtttcatcagcactacatttactcatcgttgatttcctctgtatgtgcacccaaggtgccagataaacgttgtggatattttacgcttccggaaagtgctgctccagttgttaattctgcaaaatcggataagtgaccgaaatcacacttaaaaatgatctaaaacaaaattcacccgaatccatgagtgcgccacctccaaattttgccagctggatcgcgtttcttagatcatatttgaaaaaagatagaaacatacttgcaacattccagctggtccgacctatactctcgccactggtctgatttctaagatgtacctcagaccctacacttcgcgctcctgttacagcacgtaacatagtttgtataaaaataaatcattgaggttatggtcatgagccagaaaaccctgtttacaaagtctgctctcgcagtcgcagtggcacttatctccacccaggcctggagcgcaggctttcagttaaacgaattttcttcctctggcctgggccgggcttatagtggggaaggcgcaattgccgatgatgcaggtaacgtcagccgtaaccccgcattgattactatgtttgaccgcccgacattttctgcgggtgcggtttatattgacccggatgtaaatatcagcggaacgtctccatctggtcgtagcctgaaagccgataacatcgcgcctacggcatgggttccgaacatgcactttgttgcaccgattaacgaccaatttggttggggcgcttctattacctctaactatggtctggctacagagtttaacgatacttatgcaggcggctctgtcgggggtacaaccgaccttgaaaccatgaacctgaacttaagcggtgcgtatcgcttaaataatgcatggagctttggtcttggtttcaacgccgtctacgctcgcgcgaaaattgaacgtttcgcaggcgatctggggcagttggttgctggccaaattatgcaatctcctgctggccaaactcagcaagggcaagcattggcagctaccgccaacggtattgacagtaataccaaaatcgctcatctgaacggtaaccagtggggctttggctggaacgccggaatcctgtatgaactggataaaaataaccgctatgcactgacctaccgttctgaagtgaaaattgacttcaaaggtaactacagcagcgatcttaatcgtgcgtttaataactacggtttgccaattcctaccgcgacaggtggcgcaacgcaaagcggttatctgacgctgaacctgcctgaaatgtgggaagtgagtggttataaccgtgttgatccacagtgggcgattcactatagcctggcttacaccagctggagtcagttccagcagctgaaagcgaccagtaccagtggcgacacgctgttccagaaacatgaaggctttaaagatgcttaccgcatcgcgttgggtaccacttattactacgatgataactggaccttccgtaccggtatcgcctttgatgacagcccagttcctgcacagaatcgttctatctccattccggaccaggaccgtttctggctgagtgcaggtacgacttacgcatttaataaagatgctagtgtcgacgttggtgtttcttatatgcacggtcagagcgtgaaaattaacgaaggcccataccagttcgagtctgaaggtaaagcctggctgttcggtactaactttaactacgcgttctgataacgcgttcgcctggataaagtcacctgcatagcaggtgactttaactcccccacttcaccgaaagtagtgtcctcattgcttacctcctgagttttgcaaacagcctgttggcagcttgccctttcaaatcaataagcggtatccacagacaaacctgaagggaaaggcatattttcaggcgttctgctcgtccttctcaaagagtttacttttctgcatttccaggatactccccccccctggctattgtgcgctcatacactcaaattaaagataggttctaaataaatgagcgttttttgatagtctatttcattaggtaatatatatttgtaacaaatcaatcaaaatggaataaaatcatgctaccatctattagtatcaacaataccagcgcagcttacccagaatccatcaatgaaaataacaatgatgaagttaatggattagtacaagagttcaaaaacctttttaatggtaaggaaggaataagcacctgtattaaacatctacttgagcttataaaaaacgccatacgagtaaacgacgatccttatagatttaatattaataattccagtgttacttatattgatattgactccaatgatacagaccatattactattggtatcgacaaccaagaaccaatagaattacctgcgaactataaagacaaagaactcgtccgtactatcattaatgacaacatagttgagaagactcatgatatcaataacaaggaaatgatcttcagcgcattaaaagaaatatatgatggagatcctggttttatcttcgataagataagtcacaaactcagacatacggtaacggaatttgatgagagcgggaaaagcgaaccaacggacttatttacctggtacggtaaagataaaaaaggcgactctctcgctattgtaattaaaaataaaaacggaaatgattacttatctctcggttactacgatcaggacgactaccacattcaaagaggaattcgtattaatggtgatagtctcacccaatattgtagtgaaaacgccaggagtgctagtgcgtggtttgaaagcagtaaagctatcatggcagaaagttttgcaactggttccgatcatcaggttgtaaacgagctcaacggggaaagactgagagaaccaaacgacgtttttaaacgttatggtcgagcaataagatatgattttcaagtggacgatgcaaaatataaatgcgaccatctaaaagaaatagtttctactttagtcggtaacaaaattaacgttggccattctcaaaaaatatataagcattttaaggatctcgaaggtaaaattgaagaaaggcttcaaaatcgccaggctgaatatcaaaatgaaattaatcaaccatctgcgccaggtgttaattttgatgatatttaaaattatttttccagttttttgatttttcaacagctgaatatcggaaatagtcagtgacgaacatcagtatttttacataattacgtctaggtcattgtcggtttatctccttttacttgtggtaattgagggataacaacaaaaaaggtgagttttgcgactcaccttttttatttgtttcttattcagaatcaatatcttttaaatcatcctgaatcgcttgtgcgttcggattttcctgcggtttgagttcgccgccattagcgatgaaatcatgacgctggaagtacgcttcgcgcaccataatataaggatcggagctctgacgcagcagaccatcggaatccagcagctgagcgcgggtttcgatcccttcaagcgtccatttacccacagacatcggccaggtcagccaggaaagaaccgggtaaaaaccatccgccatatcaccaccgtcatcacgcagcgtgaagctaccgtagaacggtaactgaacgtaaggcccataacccacgccataatgaccaagcgtactaccgaagcggtgaggttcagtccgttgcagtttcgggttcgccatccctgcaacatcaataaaaccgcccatccccaaaatggtgttcaggaaaaagcgggtaaagtggaccatcccctgataagggtcgccctgcaagaagtagttaaccatcaccgcaggttcttcaaggttgccagtaaagttgctcaaaccgttacgcgccggttgcggaacataatcacgccaggcgacagcgaccggtcgaacaatatacgggtctaatacattgaagttgaagttgtacatggtgcggttgaacccttctaacgggtcagaacgcccttgctgatctgtaccggaactcgcacaccccaccagaagcgtagttcccagagcaagcgcgctcaggcgaagcttcataaatgtctccctgtttttttatggcttatgcagtttgccatccatgacggaacgataccgtatccgcctgtttaggtgtgggcgattgtaacagcacgtcaactgatgtccagacgccctgatttgctgatttgatcatagcctggtaatcgccgccctgtaggctacttgattctatagaaacagaaaaaggcaaacgcagccttttctacattttcagagtaactcccgtcagttgcgagcaaaaaagccgctacgctttagctatacgtgctaattcaagagaagagaccatggacaacgacaaaattgatcaacacagcgacgaaattgaagttgagagcgaagaaaaagagcgcggcaaaaaaatagaaatagatgaagaccgactcccctcccgggcgatggcaattcatgagcatatccgccaggatggtgaaaaagagctggaacgcgacgcaatggcgctactgtggagtgccattgcggcgggtctgagcatgggcgctagcttactggcaaaagggatatttcaagtcgaactggaaggtgtgccgggcagcttcttgctggagaatctcggttatacctttggttttattatcgtcattatggcccgccagcaattatttaccgaaaataccgtgactgcggtactacccgtcatgcaaaaaccgacaatgagcaacgtcggcttacttatacggttatggggcgtcgtgctgctgggtaatattctcgggacaggtattgcggcgtgggcatttgaatatatgcctatcttcaatgaagaaactcgcgatgcatttgtcaaaatcggcatggatgtgatgaagaacacccccagcgagatgtttgccaacgcgatcatttccggctggctgatcgccactatggtttggatgtttcctgcagcgggtgcggcaaagattgtggtgattatattgatgacctggcttattgccctgggtgacaccacccatatcgtggtcggttctgttgaaatcctctatctggtgtttaacggtacgctgcactggagcgatttcatctggcccttcgcactacctactttagcggggaacatctgcggcggcacctttatcttcgcgttaatgagtcatgcacagattcgtaacgacatgagcaataagcgtaaagcagaagcacgccaaaaagcagaacgtgcggaaaacattaagaaaaattataaaaacccggcataaatggcgagggtttaagcaatcgagcggcagcgtacttaccccgcactccattagcgggtatactcatgccgcattgtcctcttagttaaatggatataacgagcccctcctaagggctaattgcaggttcgattcctgcaggggacaccatttatcagttcgctcccatccgtaccagtccgcaaaatcccctgaatatcaagcattccgtagatttacagttcgtcatggttcgcttcagatcgttgacagccgcactccatgacgggtaaaaagtggataaaataattttacccaccggatttttaccctagagccatacagcctcacactcgatgaggcctgtcagtttcttaaaatatcctgatctaccatcgccgtcatagagcgtatttttattacctgatttgcaggttcgattccctattcggagatagcactcatgcaacacgaactacagcctgatagtctggttgatttgaaattcatcatggctgatactggctttggtaaaaccttcatctatgaccggattaagagtggcgacctgccaaaagccaaagttatccacgggcgagcaagatggttatatcgtgaccattgtgaattcaaaaataagctcttaagccgcgccaatgggtaaaatagcgggtaaaatatttctcacatctaaaaaacaccattccaatcaatcccctgctgcttcaagtagatgtctgcaggggacaccatccttgtgtttatccctaaaaccacataaaaaccgtaaattaaattcgaactagcaggccgaataaggcacaccaggaactcgtggttttattcattaactagtggtttttacctgttctcttagccagataataaacgcttcaatttttggccactgcctgcccggtaatgtggtgatgtaataatgctgatggcatttcaccgtcatatcgccaaacggcgcgacgagctcaccactggcaagccttttttgtaccaggcgttttcttcccatcgccaccccaatatgattcatcgcggcaataacagctaaatcagaacgatcaaagccaattccagaagatgtcggcaaattaaccgcataatgttgcgcccaactatgccattcatccgtaccggagtcgttgctccatgcctgtctgtcatggagcaacgtacagtgacacaggttaattaccgtgttggttaaagcatgtctttgagcgtattccgggctacatactggcaggatttcttcatccatcagaaagtgatgagtgagttgcgcactcggcgcatcatcaaagtagatcgccaaatcgattccggcacgttgcagattgacgttgtcattaccagtgagcacggtgaggctaatagacggataccggcgtgtaaagtcacctaatgcgggcaccaaccagcattgggcgatagagggccgggaatacagagttaacgttccgcttaactcctgatttttgatatcaagaatttcctggttcagggtatccaggctgctttttagcgcccaataaacacgtttcccctcgtgcgttaattccactttgcgatgggaacgaacaaacaactgaatgcccaattcttcttccagctgattgatacggtgacttaccgcactggggctcaggctcaattcctctgccgccagggcgaaggactgatgcctggcagccacttcaaaagtatgcattttacttaattgccagccgttaagcagccgatttcttatttcacgaaggggttccataatcacctcatttttcgcttaagtgtaaaaaaatagcggcaaaatttcagctatgagatgagctaaagtgaaccatatctcaattcaccttcatttttagatgtaaatcactccattgatgcaatttacctcatgtgaaaggcaaattttatcgtttgtcagcctgcgttgtttttttgtccaatatcatcaggttaatcacaggggaaggtgagatatgcactctcaaatctgggttgtgagcacgctgcttatcagcatcgtgttaattgtactgaccatcgtgaagttcaaattccacccgtttctggcgctgttgctggccagcttcttcgtgggaacgatgatgggcatggggccactggatatggtaaatgctattgaaagtggaattggcggaacgctggggttcctcgcagcggttatcggccttggcacgatactgggaaaaatgatggaagtatccggggccgcagaaagaattggtctgacacttcaacgctgccgctggcttagtgttgatgtcattatggtgctggttggcctgatttgtggcatcacgctgtttgttgaagtgggcgtcgtgctattgattcctctggcttttagtattgccaaaaaaaccaataccagtttattaaagcttgccattccgctatgtaccgcattgatggcagtgcactgcgtggttcctccacatccggctgctttatatgttgccaataagctgggcgcagatatcggtagcgtgatcgtctacggtttgctggttgggctgatggcaagtctgatcggtggcccacttttccttaaatttctgggtcaacgactgccctttaaacctgtacccacagagtttgcagatctcaaagttcgcgatgaaaaaacactaccgagtttaggcgcaacgttattcaccatactgctacccattgcgctgatgttggttaaaacgattgccgaattgaatatggcgcgtgagagtggtttgtatatcttggttgagtttattggcaaccctatcactgccatgtttatcgccgtgtttgtcgcctattatgtgttgggtatacgccagcatatgagcatggggacgatgctcacacatacggaaaatggcttcggttctattgctaatattttgctgattatcggggccggaggcgcattcaacgccattttaaaaagcagcagtctcgctgatacgctggcagttattctctccaatatgcatatgcacccgattcttctggcctggttagtggctcttattctgcatgcggcagtgggctccgctaccgtggcaatgatgggggcaacggcaattgttgcacccatgctgccgctgtatcccgacatcagcccggaaattattgcgattgctatcggtagtggtgcaattggctgcactatcgttacggacagccttttctggctagtgaagcaatattgcggcgctacgctcaatgaaacatttaaatactatacgacagcgacatttatcgctagtgtcgtcgctctggcgggcacattcctgctgagttttatcatctaagcgcaaagagacgtactatggaaaacgctaaaatgaacagcctcatcgcccagtatccgttggtaaaggatctggttgctcttaaagaaaccacctggtttaatcctggcacgaccagtttggctgaaggtttaccttatgttggcctgaccgaacaggatgttcaggacgcccatgcgcgcttatcccgttttgcaccctatctggcaaaagcatttcctgaaactgctgccactggggggattattgaaagtgaactggttgccattccagctatgcaaaaacggctggaaaaagaatatcagcaaccgatcagcgggcaactgttactgaaaaaagatagccatttgcccatttccggctccataaaagcacgcggcgggatttatgaagtcctggcacacgcagaaaaactggctctggaagcggggttgctgacgcttgatgatgactacagcaaactgctttctccggagtttaaacagttctttagccaatacagcattgctgtgggcagtaccggaaatctggggttaagtatcggcattatgagcgcccgcattggctttaaggtgacagttcatatgtctgctgatgcccgggcatggaaaaaagcgaaactgcgcagccatggcgttacggtcgtggaatatgagcaagattatggtgttgccgtcgaggaaggacgtaaagcagcgcagtctgacccgaactgtttctttattgatgacgaaaattcccgcacgttgttccttgggtattccgtcgctggccagcgtcttaaagcgcaatttgcccagcaaggccgtatcgtcgatgctgataaccctctgtttgtctatctgccgtgtggtgttggcggtggtcctggtggcgtcgcattcgggcttaaactggcgtttggcgatcatgttcactgcttttttgccgaaccaacgcactccccttgtatgttgttaggcgtccatacaggattacacgatcagatttctgttcaggatattggtatcgacaaccttaccgcagcggatggccttgcagttggtcgcgcaagtggctttgtcgggcgggcaatggagcgtctgctggatggcttctatacccttagcgatcaaaccatgtatgacatgcttggctggctggcgcaggaagaaggtattcgtcttgaacctagcgcactggcgggtatggccggacctcagcgcgtgtgtgcaagtgtaagttaccaacagatgcacggtttcagcgcagaacaactgcgtaataccactcatctggtgtgggcgacgggaggtggaatggtgccggaagaagagatgaatcaatatctggcaaaaggccgttaataacgtttcaacgcagcatcgcaatcctttccctgggtgagcgatgctgccgatggcgcagacttaagatccccggtcttacccgctataaccccctccttttatcatcacccaacgcctttcgctgtaaacggcggtttcgcaaaccaaaccaaaaccgtaagtaagataaaagcaatagccgccatacggaaaatctcatttgcagaaatagaaagactctgctgggttatttcattattaatttcattaagaactccactaaggctaccataatatttatccataatttgactgctactattaaacacggggttaaattgatcgatggttgctgtcaactgactatggtgtaagctttcgcgtcgtccccacagcgtcattgtcaagctcgtaccaacacttccactcaaggtacgaaaaaaattactcatactgctggcattggcaaatttattatctggcaagccactaaagctaatcgttgttaagggtaaaaagaaacaggcaacggcgaatccctgaaaaaactgcggcaaaatgatgcctgtaaaatcaatcgttggcataaatgtcacagaacgccagtaatagcaaaccgcatacatcaaaaaactaaatgtcactaacaaccgcatgtctattttgttgccataacgtcctatcaaaggactaattaatagtggcatgatgccgatgggcgcataagcaagtccggcccatatcgcattataccccatcgtttcctggagtaactgcggcataaggacgatcgctccagagtaaaataaatacgcgcatgtgatactcacaataccaatggtgaagttacgggacttaaacaaactgagatcaagaatcgggttctcactggtgctctcccaaatgactaaagagatcagagaaataacacttactactgttaatattattattgtactgctgttgaaccaatccagatcgcgccctttatcaagcataatttgcaagccaccaacaccgagcactaacagggtcagtcctggtagattcattttgaccggactagtctcagtttctcttcctttaagtaaggttaagcataatgtcaggacgataatccccatagggacattgattaaaaatatccaaccccagctaaagttatcacaaatataaccgcccaatatcggcccacatatcggagcgataatcacggtcatactccataatgccagagcaaatgttcttttttctggcggataattccttaataataaactctgactcagtggaattaacggccccgccattaacccctgaacgactctaaaaaatatcagcacatcaagattggtgcttaggctacacattaaactagacaggctaaaaaaagtgacactaagtaaaaataatcttaattcgcctattctttgtgccaacctgccagtaacagggatcgcaatggcatttgctacaccaaagctggtgataacccaggtgccttcgtctgtacttgctcccagaaagccagatattgtcggtattgcgacgttagaaatagtggaatccaacatttgcataaatgtcgctaaactcaatgcaatagtgacgcaccataacgtcccaccggttaatggtgccggagtacttttagtgattgccattaaagttgtccattatggctaataatgttgctaatttctttttctatcggactggtatcgataactaaagccttactggtataagccggcatggaggtcacggtactagccagctcaggcatctcggcaatgtcttcgttcttcgtatcaatagttgctgtcatgcttaaaccaatacgcaaggggtgttccatgagttcttttggatcaagagaaacttcaaccggtacacgctgaacgattttgatccagttccctgtcgcattttgtgcaggtaataaggagaacgcattgccggttcccatattgatccctgtcacccgaccatgaaacacaacattttcaccataaagatcgctgataatattgacgctttgaccaatccgtacatccgtgagttgtgtttctttaaagttggcattaacccacatttgacgtgccggtacgacagccattaagctttgtccggggctcactgtttcgccgacctgaacacttctctgggcaatatagccggtaaccggactcttaatatccgtacgtttaagcgccaaccaggcttctttagttgcatccgccgcttcaacgacttgtggctgacggtttaatggtgtgttcattactaaagctttattcgctttataagcctggatagcggcattcaatgccgctttgctacttattaacgtatctttggtatgctccagcgtttctttactaataaccccctgcttcgctaacggcactcgacggttataatcttctaaagattgttgatactgaatacgtgcactagcgacttcggcactgtattgtttatcctgtaagtatagtttattcgtttgccgaacaatatttgccagattatttttagctttattgagtgcgatagtggcatcagttttatccagactaactaaaatgtcaccttgtcgaacgtagttcgtatctttatgattaacgacagtgacactaccactgacttgtgcagaaattggatctgcattccccgtgacataggcgtcatctgtactaatcatgtcttctaattccatactccaataggcataggcaccactaaacgcaataaataaaactaccgccaataaagaaaagtattttcttctgttagaatgttttttattactattaatctgttccactattatctctcatttctcatagatgaaatttatgaattgaatgaaaagagcattcattcttcatatcaaacacagtgcatgtgttgcacattatcccaggaacgttggaggcctaatttaaatgaggtgcaaaaaaaacaacagaggactaaaccgtggcttttgcaatacaattcttacgcctgtaggattagtaagaagacttatagtgccaacttgaaactataaatcatcggtacaatccctgattttattgttgacatttcatttatgccgactatttatatggtatacttgtcgaattatcttaaaggaagctcagattttcttatttttattgagaaaatgagatgacgccttatgtctgtattactacagggagaagggagatgcttcattgcaaagggaataatctatgaacgcaataattattgatgaccatcctcttgctatcgcagcaattcgtaatttattgatcaaaaacgatattgaaatcttagcagagttgactgaaggcggaagtgccgttcagcgggtggaaacacttaagcctgatatcgtcatcattgatgtcgatatccccggagttaacggtatccaggtgttagaaacgctgaggaagcgccaatatagcggaattattattatcgtctccgctaaaaatgaccatttttacgggaaacattgtgctgatgctggcgctaatggtttcgtgagtaaaaaagaaggcatgaacaatatcattgcggctattgaagctgcaaaaaatggctactgctatttccccttctctctcaaccggtttgttggaagtttaacgtccgaccagcaaaaactcgactccttaagcaaacaagaaattagtgtcatgcggtatattcttgatggcaaggataataatgacattgctgaaaaaatgttcatcagcaacaaaactgtcagcacttataaaagtcgcctgatggaaaaattagaatgtaaaagtctgatggatctttacacattcgcacaacgtaacaaaatcggctaaccacatgaagtttttaccctatatttttcttctctgttgtggtctttggagcaccataagtttcgcagacgaagattacatcgaatatcgtggcatcagtagtaacaaccgtgtcacacttgatccactacgtctgagcaacaaggaattacgttggttagcgagcaaaaaaaatcttgtgattgcagtacataagtcccaaacggctacgttgttgcataccgatagccagcaacgggttcgtggtattaatgctgattatttaaatcttttaaaaagagcgttaaatatcaaattaacactccgggaatacgcagatcatcaaaaagcaatggacgcgcttgcagaaggtgaagtcgatatagtgttaagtcatttagttactagcccgcctcttaataatgacattgctgcaaccaaaccattgataattacctttccggcgctggtaaccacccttcacgacagtatgcgaccgcttaccagtccaaaaccagtaaatattgctcgggtagcaaattaccccccagacgaggtaattcatcaaagttttccaaaagcaacaattatctcttttacaaatttatatcaggcattagcatccgtcagtgctgggcacaatgattactttattggtagtaacatcattaccagcagtatgatttcccgctatttcactcactccttaaatgtagtgaaatattataacagcccgcgtcaatataattttttcttgaccagaaaagaatctgtcattcttaatgaagtactcaatagatttgttgatgctttaacaaatgaagttcgctatgaagtaagtcaaaattggcttgatacaggaaacctggcctttctgaacaaaccattagaactcactgaacatgaaaaacagtggattaagcagcatcccaatttaaaggtgctggaaaatccttacagccccccctattctatgacggatgaaaatggcagcgttcggggcgttatgggggacattcttaatattattaccttgcaaacaggtttaaatttttctccgatcaccgttagtcacaatatccatgctggaacacagcttagccccggaggatgggatataatacctggcgctatttatagtgaagatcgagaaaataatgttttatttgctgaagccttcataacaacgccttacgtttttgtcatgcaaaaagcgcctgacagtgaacaaacattaaaaaaaggaatgaaagttgccattccatattattatgagctgcatagccaattaaaagagatgtatccggaggttgaatggatacaggtcgataatgccagcgctgcatttcacaaggttaaggaaggtgaacttgatgctctggtcgcgacacagctaaatagccgttacatgatcgatcattactatcctaatgaactttatcattttcttattcctggcgttccgaatgcaagccttagcttcgcttttcctcgcggagaaccggaacttaaggatattattaataaagcactgaatgcaattcccccaagcgaagttctgcgcctgacggaaaaatggattaaaatgcccaatgtgaccattgacacatgggacctatatagcgagcaattttatattgttacgacattatccgttttattagttggcagtagccttttatggggattctacctgttacgcagtgttcgtcgtcgtaaagtcattcagggtgatttagaaaaccaaataagtttccgaaaagcactcagcgattccttaccgaatccaacttatgttgtaaactggcaaggtaatgtcattagtcataatagtgcttttgaacattatttcactgcggattactacaaaaatgcaatgttaccattagaaaacagtgacagtccctttaaagatgttttttctaatgcgcatgaagtcacagcagaaacgaaagaaaatcgaacaatatacacacaggtatttgaaattgataatggcatcgagaaaagatgcattaatcactggcatacattatgcaatcttcctgcaagtgacaatgcagtatatatttgtggttggcaagatattactgaaacgcgtgatctaattaatgcactcgaggtagaaaaaaataaagcgataaaggctaccgtagcaaaaagtcagtttctggcaacgatgagtcacgaaataagaacaccaataagctctattatgggcttcctggaacttctgagcggttctggtcttagcaaggagcaacgggtggaggcgattagtcttgcctacgccaccggacaaagtctcctcggcttaattggtgaaatccttgatgtcgacaaaattgaaagcggtaactatcaacttcaaccacaatgggtcgatatccctactttagtccagaacacttgtcactctttcggtgcgattgctgcaagcaaaagcatcgcattaagttgcagcagtacgtttcctgaacattacctggttaagatcgaccctcaggcgtttaagcaggtcttaagtaatttactgagtaatgctctcaaatttaccaccgagggggcagtaaaaattacgacctccctgggtcacattgatgacaaccacgctgttatcaaaatgacgattatggattctggaagtggattaagccaggaagaacaacaacaactgtttaaacgctacagccaaacaagtgcaggtcgtcagcaaacaggttctggtttaggcttaatgatctgcaaagaattaattaaaaatatgcagggcgatttgagtttagaaagtcatccaggcataggaacaacatttacgatcacaatcccggtagaaattagccagcaagtggcgactgtcgaggcaaaagcagaacaacccatcacactacctgaaaagttgagcatattaatcgcggatgatcatccgaccaacaggctattactcaaacgccagctaaatctattaggatatgatgttgatgaagccactgatggtgtgcaagcgctacacaaagtcagtatgcaacattatgatctgcttattactgacgttaatatgccgaatatggatggttttgagttgactcgcaaactccgtgagcaaaattcttccttacccatctgggggcttacagccaacgcacaggctaacgaacgtgaaaaagggttaagttgcggcatgaacttatgtttgttcaaaccgttgaccctggatgtactgaaaacacatttaagtcagttacaccaagttgcgcatattgcacctcagtatcgccaccttgatatcgaagccctgaaaaataatacggcgaacgatctacaactgatgcaggagattctcatgactttccagcatgaaacgcataaagatctacccgctgcgtttcaagcactagaagctggcgataacagaactttccatcagtgtattcatcgcatccacggtgcggctaacatcctgaatttgcaaaagttgattaatattagccatcagttagaaataacacctgttagtgatgacagtaagcctgaaattcttcagttgctgaactctgtaaaagaacacattgcagagctggaccaggagattgctgttttctgtcagaaaaatgactaaatagcggctcccacaatgttcaaatgtgggagctatttaccagcacatcttacatttaactactgaactcctggcgaatttgttccccatgctggtcgagcgttgccgctcccggcataacatgcgggtccgcgcagccgctgatttttatcggattacccggcatcattattcccccggcttcaatcaacatatttctcgcctgagtttgtggcaatttaatggcctcagccacacttaataacggcgcgacgggtacaccaacttcatgtattctggctaaccaaacttcagctgcctgcgtttttaacgtccgctcaatatattgtttaagaatagcctggttttgtacgcgtaaaatattgctgctaaatcggggatcattaaccagttccgtaagctccagtgcctggcataacgcagaaaaaagcttgtcattaccacaacaaatcgtaatcggcttatcctgagtattgaaaacatcaaaaggtgccatgtagggatggcgatttcccagacgttgtggactcttcccagttgcgatatatgccatcagaccatgctccagaaaactcagcgtggcatcaaacatcgctatatcgacatgcgcccctctctggctcttttcgcggccataaagtgcactcactattccgctgaataaatagacaccgccgcatagatccgcaagagatgtaccaacgcgcactggcggagcatcaggatatcctgtttccatcattatcccgctcattgcctgaatgatggtatcgtaggcaggagcatcttttagcggaccggtatgtccgaaaccactgctactagcatatatgaggcgcgggttgatttcttgaagcgtttcccaactaaaccccagtttttccattgtacctgggcgaaaattctcagctaatacatcagcttgtttgagcatatttataaatatacttttatcgtgatcattctttaaatcaagaaccacactctctttgccatgattaataaaactgtaatagagactctgtccatccacatagggaccaaatgtgcgggtatcatcaccatgacccggcggctcaactttaattacccttgcgcccatattacaaagaagttgagttccgaaaggtccattaaggacatgtgtcatatcgataactaataagccttcaaacggccctttgctttcattatttgtcatttgcttatgccttgaaaaaagccgaaggtgaaaagacacttcggcatttatgtaaaatcaataacatgattaattaactaaccagtcgactgacataaatccacaagggagccgtgacgacaaagcccagtacgctcacagccaaactcgctgtaccagtacgggtgtagacattaaaccggctggcaataatgattccggagaatgccggcggtaatgcgcctgccagtaccatcatctgcagatgttcgctgttcaaatgacatgccataccaacgagaagcagtgccagtggcatcagaatcagcttcaggaaggtgttataagcaatttcggcactgaactcgaatttatgtgcagccagagtcaaccccgcagcgaataccgctaccccactgttagccttcgcaatcagattaaaggttgggtcccatgctgccggaatttttaccccaaccaacaccaggatcgttgccagaacaggtgcccatactactggctcctttgccgcagaaattaatgcgctcagattactattcttcttaccatccgctccactagaaggattcagcaaatacagaccaataggaatagtaattgcgttaacaataatagaaataattgctaccactaaacctgtacttacggaatcaccataaataggatcgagaactgcaaaccccaggaatccaatggtaggactacctgcaattaatgcacatacagctgcttctgcatgggtacgtttaaaaaatttgtagcaaccgaaccaggagaaaaagaaacatccgacaataaccacaagacttacaagggtcagacgagtgtccgcaaaaatcatttccctgtttgcccgagtaatagatacaaatagagccgcaggaagcgcgtagtttaataccagtttattaaatgcccgagcttgatcttcactaaatgtttctcgtctgccgctaaaataacccaacagcatgattacgataataggcaataaatcgccaataaaaaatgttagcataatagtatttccgataagggtcccctcaccatcgcataatgagttggcaagaggagacgatgtcagtatttaattaccagcgacttgttttgggttaagtttggtaatatggccactttcagttcctgctgcagggtcgatgaccacattaataatggtcggtttgcggctctgaataccggtggttaaagcatgacgaagttcatctgtcgtggtgacgttatagccaacgccacgaaacgcatccattaatttgtcataccttgcatggtgcaacagatccgttggacttggtgcaccagcgccactgagatcaacaccgtctcctctgtagatgccgccattattaaaaataacgatcgtcaccggcaggttatatcgacaaatcgtttcaatttccatcccactgaaaccaaaagcactatcaccttcaatggcgacaaccggagaaccagaagtcacgctagcaccgatggcatagcccataccgatgcccatgacaccccaggtaccacaatccagacgacgacgtggtttatacatatcaataatatttcgtgcattatccagggtatttgcaccttcattaactaaataaatatcctggttctcgcgcaatacgtcgcgcacagcacttaatgcattaaagtaatttaatggttgagtatctgtacttaatttttcatgcattttttgtgcattttgctgcttgtggatatttaaaatatcgcgccataccagtggagtcgtaaatgtgttttgtttcagttctgccagcataccttgcatactggatgcaatatcaccaacgactggcacagcaatggggcggttgctgtcaatttcctgcggttcaatatccagttgaataaactgtgtatctgccgcccatccttttttaccgtgtgccaataaccaattcagtcgtgcaccaacaagcatgacaacgtcagcatttgccagggcaaagctacgcgcagctgccgcagaaagtggatgcgtatcttcaaggatccctttcgccatagacattggcaggaatggaatctgagcactttcaataaattcacgaagctgttcatcagcttgactatacgccgcgcctttgccaaggataattaatggccgttcagcttttgctaaaaggctaattgcgctagtgacactcttcgggcatggcaataatgctgggctcggattttcaactttaacaatcgtggttaacgcttcgtctttttccatcgtcgcggccaggacatttgctggcaaatcaagataaactccgccagggcgaccgcttacagagacccggatagcgcgtgccaatgcaatgccaagatcctgcggctgattaacgcgaaatgctgctttggcatacggttttgccgcattcatttggtccagctcttcataatcaccttgctgtaggtcgacgatcgcgcggtcgctggagccgctaatcatgatcatcggaaaaccatttaccgttgcgttggccaatgcggtcaaaccattgaggaatcctggcgcagaaactgtcaggcagatccccggtttttgggtaagaaaaccgcttgccgcagcggcatagcctgcgctctgctcatgacgaaaaccaatataacgaatgccttccgcctgggcatggcgtgccatatccgtcacaggaatacctacaacaccataaatagtgtcaatattattctgttttaatgcttcaacgatgatatgcataccatctgtcatttgaagttgatcactcatgattaataacctcgaaatttttataaattgggagccagaagcccccgttaatatcagatggcgtggttttgcttcattgcagcaatttcatcgtcgctataacccagctcctgcaatacagcagcggtatgttcacctaatagcggcgcagctttaatatccggcgtaaaggcagagaatttcattggacaaccaacggtcagatattttccacgcaacggttgttccacttcaacaacactgccactttggcgcaaagagggatcaagactaatttctttcatacttaaaaccggtgcacaaggaatatcaaactgagtcaaataggccaccgcttcatgtttatcaatagtgacagtgtatttttcgatttcagcaaaaatatcgaaaatatgtggctgtcgtgcatgggctgtactgtatgccggatcggtaatccattctggtttgccgatggctttacaggtgttttcccagttttgctcctgaatagtgaaataaatataggcgttaggatcggtttcccagcctttacatttcaggatccagccaggctgaccgccaccacctgcattaccaccgcggggaactgcatcaccaaatgtaccattcggatactgcgggtattcttccagataacccaatttatcgagacgctgctggtcacgtaatttcacgcggcaaaggttcaatacggcatcctgcatactcatggtgactcgttgcccacgccccgttttttcgcgatgcagcaaagcagcaagtaaaccgatcagcaaatgcattccggtgttgctgtcacccaacgctgcagcgcttaccagcggcggaccatcccaaaaacccgtagtggatgccgcgccacccgctgcctgagcaacgttttcataggcttttacattcacataagggctacactcatcaaaccctttgatgctaccaaaaatcagacgtggattgatttcttgaatatgctcccaggtgaagcccatgtgatcaatggcccctggatgaaagttctcgactaagatatcagcttcgcggatcagcttttccattacctctttgccttccgctgttttggtatttaactcaatagaacgtttgttactgttaagcatggtgaagtaaagcgcatcgatatcaggaatatctcgcagctggtgacgcgttacgtcaccaacgccgggacgttcaattttaataacgtcagcgccaaaccaggccagcatttgagtacaagatgggccagattgcacaccggtgaaatcgagaactttaattccttgaagtggagtactcatagcaatacctattagttaattaaatatgtgttaatttagcgtttatttaaggcgtaatatcttctataaataacccgcaaaatatcgtcgtagctgcactcgatatttttaaaatcctgtatcaagtgctgaaaatcatttcatcgccacttccaattcctttctgcatggtaagtagtgaggacgaaaagaagaatatgataaatattgattcgtggtaatcagagagagtcgcgacatttgtgatgttattcttacaactgtaagaagcgccggtgatttacaagcaagggtatgattacgctttttaaagcgtaccataaaacataacataataaatgatttgtgatgacacgggattattgcggtttactttgaggaatataaaatgcgagtttatagcaccgcgagcgccaaataattttatgaccacaacctgtcgtattgtggtcataaaaaattgtcggctggagggagttaaatcctttacctcaatatactgcctgtcagcattagttcacaaacagtgcttcgctatcgacgatgattccatcttccgcacctttaagcgccaggtttgcctcgtagtattgctttttatcaagcagtttctgcgcatcagcaagtgcattacgagtctgtttaagtggcatcagatattggttttccattacgccaacaccggccaggcgaagctcttccattgcgccctttttatcccctttcgccattttttcattggcaatttttatcgcggcttctttttcgggagttgctacataactctcagaaattccgacagatgcattaatgacaatatattggtcatcattgagattggtctttttacctggcttagcgaactttgcccattcggtactgtcatcactcagcaaagcggaagcttcattggtcagttcttttgccttttctggatcgccatgaaacagagccaggcgcgctacctgcacgtcacgcatcgcatataaaccttgttcagagatacgctctgctgccgctgccgttttctgggtttgctgaacttgctgagtttgctgttgtgccgctaccggagcattatcagcagcccatacagtactagatgccagaattgctgtgaccatcgtggccataattaaacgtttcatacttacctcattctttaacagttttagaaaacgccgccatcatattgggtgagcatgaaatgagaaatcagagagcaacggtcattttgaaagggttatcttacagttgtagttattatcgcaagaagtattttagtcttacaattgtaggaatatgcttcctgtcgcagagaactattcttatataccacaaagagatgtcatttattatatcgatgtaaatactgattaattaaatgtaaatacagccataacatcgtaggttctcagtgaaccattttcaggataactttctatgaaagtaaacttaatacttttcagcttatttttattggtctctattatggcatgcaatgtttttgcattttccattagcggtggtggaagtgagaggagctataaagagactgaaaaaacaagtgcgatgacgaccacacactctacaaaacttcagccaagtcaggcgattttgtttaagatgagagaagatgcgccaccattaaacctcacagaagaaatgccgcccccttttccgacaaaggcgaattatcttattcatcctgtgcgataacgtctttcacatggcaggtgaacaatcatgtctgatgctgatgtgaacacctgcccaaatgagccatcctgacccattaccgcctgccataccccaccataaagcgaatcatcaagccacaagccggggcaagaaacataaatatccccgtcactagttcattaccgccagttaaccacatggtgaagtaataaatgagtgcagcgaggatcaccatgccgaagaaagaagagaccgcgcttaccacgttcagtacctgaccgatgtagccgcttacgcagacaatacacagggcgagaaacatccataaattaatcatagctcaacctcctgccgcgctaaaaaacctgtaacttcagtcactttaatagtaagacaatccttaacctctggcaatttttgctaagcatcaatgaaaacagcatgttaaatgcaagactgttgtgtacggaaaaatatttactttgcacgattaataatcagtagctgaaagcagtcagcgagtgataaagtacagataccgcattcatgctcctcgtggttatgtcctgactagtctttacactctttacaggaaccattgtcgtacatgatggcccaaccaattgagtgtaccgctgtcgacatggaatcttctgcgatacaacaattcgtatctacagaaggtaactatgtttccacaatgcaaattttcccgcgagtttctacatcctcgctactggctcacatggtttgggcttggtgtactctggctttgggtacagcttccttatcctgttctctgctttctcggcacgcgtattggcgcaatggcgcgaccattcctgaaacgtcgtgaatctatcgcccgtaaaaacctggaactttgtttcccgcagcattctgcggaagaacgcgagaagatgattgccgaaaactttcgtagtctcggcatggcgctggtagaaaccggcatggcatggttctggcccgacagtcgcgtacgtaaatggtttgatgttgaagggttggataaccttaaacgcgcacaaatgcaaaatcgcggcgtaatggttgtcggcgtccattttatgagcctggaactgggcggccgcgtgatgggactgtgccaaccaatgatggctacctatcgtccacataataatcagctgatggaatgggtgcagacccgtgggcgcatgcgctctaacaaagcgatgatcggcagaaataatctgcgcggcattgtcggtgcactgaagaaaggtgaagcggtatggtttgctcccgatcaggattatggtcgtaaaggcagctccttcgcgccgttctttgcggtggaaaatgtcgccacaaccaatggcacctatgttctctcccgtctctctggcgcagccatgttgaccgtaacgatggtaagaaaagcggattacagcggatatcgtttgttcatcaccccagagatggaaggctacccgacagatgaaaatcaagccgctgcctatatgaacaagattatcgagaaagagatcatgcgcgcaccggagcagtacctctggatccaccgtcgctttaaaacgcgcccggtgggagaaagcagcttgtacatttaacaaactgctcttactctttccctcctcaaatcggccataataacctcatggtttttatggcttttttcttaaggttttttccttcgctgaatatctaattattaccgtcagaaattaaactgtcgccgatatgagacacttgtaagttactaaaagtaaataagaaaatgcctcttgtctcgtttcagttttaggcgtacattagcgccgtctcgagcagtttagctcagaattctggggtgatgcccacggtaaaatacagggcttttaaggtcgctttgcccggtgtcaactcactgtatcaggtgtaatgaagtcattcaggcgtaacagtaattacgcggagagatgtaaagtgaaatatttctttatgggcatttcttttatggtcatcgtttgggccggtacttttgccctgatgatctaaaagcaaactgtgcaatgaaaaacaggagccatcaggctcctgtttgcatttctgacgacggtgtttattccgcgttttcgtgaatatgtttgctgctggcgggtagtaaaccgtcggcacggaacatcgctttaatccctctgatggcctgacgaatacggtcgcggttttcaatcagtgcaaagcgaacatgcgtatcaccatagtcgccaaagccaatccccgggctgacacaaaccttcgcttcgttaaggagcttcttggcaaattccaggcttcccatggccgcatatggttccgggattttcgcccagacatacatgctagccttcggcatttcaaccatccagcccgcttcatgcagccctttaaccaatacatcacggcggcgtttgtactgttcggcaatgtcgcgcacgcactgttgatcgccctccagcgccgcaatcgccgccacctgcaacggcgtaaaggtgccgtaatcgtgatagcttttaatacgagccagggcgctgaccagcgttttgttgccaaccataaagccgatacgccagcccgccatgttgtagcttttgctcagcgtaaagaactcgactgccacatcgcgtgcacccggtacctgcataatactcggcgctttccagccatcgtagacgatatcggcataggccaggtcatggaccaccagcacatcgtagcgtttcgccagcgccactactttttcgaagaactccagttccacgcattgcgcggttgggttactcgggaagccgaggatcatcatcttcggtttcggataactttcacgaatggctcgctccagttcgttgaagaaatcgacaccttccaccagcggcacactgcgtacctgcgccccggcaatcaccgcgccataaatatggatcgggtaacttggattcggcaccagcaccgtgtcaccatgatccagcgtcgccagcatcagatgcgccaggccctctttgctaccaatagtgacgatggcttcactttccgggtcgatttcaacgtcgtagcgatcctgataccagcgggaaatggcgcgacgtaaccgcggaatgccgcgactagtggagtaaccatgcgtgtccgggcgctgggccacagtacataatttttcgacgatatgcggcggagtcgcaccgtccgggttacccatgctgaaatcgataatatcttcgccgcgccgacgcgcagccattttcagttcagcggtgatgttaaaaacgtagggcgggagacgatcaatgcgcgtaaagcgacgttcagggcgagtgtcagccataatttcctcagattaacgttagcgcccggaccgtccgagcgacgctgccacgatggtggctgttttgaaaatagcctgattaatttctgtctgtccagtgttttagaacattttattaatgacgttaaatgaggaactctgctttaaaaacaggaaatttatctgcgctaacaagaaaattaccactcattttattaacataataatttcaataaatttactaaccagaagtgcattatcaagagatgcattgctaatacaccatttatctatcaatccccttttaaaattgtggtttttcctcaaaaacggcctgctggtcatcagccttcaggttacctatcatagaggtttaatccttattcagagtcacccgtgcacgaaatattcaacatgctgctggcggtcttcgatcgggcagcgttaatgcttatctgcctgttctttctcatccgtatccgcctgtttcgcgaactgttgcacaagagcgcgcactccccaaaagaattgctcgccgttaccgccattttcagcctgttcgccctgttcagcacctggtccggcgttcccgtagaaggcagcctggtgaacgtacgtattatcgcggtgatgtccggcgggattctgtttggcccgtgggtaggcatcattaccggcgtgattgcgggtattcaccggtatttaattgatatcggcggcgtgacggcgatcccctgctttatcaccagcattctggcgggttgtataagcggctggatcaacctgaaaatccccaaagcacagcgctggcgcgtcggtattctcggcggcatgttgtgtgagacgttgaccatgattctggtaattgtctgggcaccaactaccgcgttggggatcgatatcgtctctaaaatcggcattccaatgatcctcggtagcgtctgtatcggctttattgtgcttctggtgcaaagcgttgagggcgaaaaagaggccagcgccgcgcggcaggccaagctggcgctggatatcgccaacaaaacgctaccgctgtttcgccatgtcaatagcgagagtttacgcaaggtctgcgaaattatccgcgatgacattcacgccgatgcggtggcgattactaataccgatcatgtgctggcctatgttggcgtgggtgaacataactatcagaatggcgatgacttcattagcccgactacccgtcaggcgatgaattacggaaaaatcatcattaaaaacaatgatgaagcccaccgcacaccagagattcattccatgctggtgatcccattgtgggagaaaggggtcgtgaccggaacgctgaaaatttactactgccacgcgcatcagatcaccagcagtttacaggaaatggcggtcggtctgagccaaatcatctccacgcaactggaggttagtcgcgccgagcagctacgtgaaatggcaaataaggcagagcttcgcgccctgcaaagcaaaattaatccccattttctgtttaacgctctgaacgctattagtagcagtatccgtctgaatccggataccgctcgccagttgatctttaatctgagccgttatctgcgctataacattgaattaaaagacgatgagcaaatcgatatcaaaaaagagctgtatcaaattaaagactatattgccattgagcaggcccgctttggtgacaagctgacggttatctatgatattgatgaagaggtgaattgctgcattcccagcctgctgatccagccgttggtggagaacgccattgtccacggtattcagccttgcaaaggtaaaggcgttgtcaccatcagcgttgcagagtgcggaaatcgggtacgcattgcggtgcgagataccgggcacggcatcgatccaaaggtgattgagcgggtcgaagcgaatgaaatgccgggcaataaaattggcctgctgaatgtccatcatcgcgtgaagttattgtatggcgaggggctgcatatccgccgcctggagccggggacggaaattgcgttttacattcctaaccaacgcaccccagtcgccagtcaggctacgttattgctttgagccggagtgatattgtgaaagtcatcattgttgaagacgaattcctggcacaacaggaactgagctggctaattaaagagcacagccagatggagattgtcggcacctttgacgacggtctggacgtgttgaagtttttgcagcataaccgcgtcgacgccatttttctggatatcaatattccgagcctggatggcgtgttgctggcgcaaaacatcagccagttcgcccataaaccgtttattgtgttcatcaccgcgtggaaagaacatgcggtagaagcgtttgaactggaggcgtttgactacattctcaaaccgtatcaggagagtcgtattaccgggatgctgcaaaaactggaagcggcctggcaacaacagcagaccagcagtacgcctgccgcgacggtaacgcgtgagaatgacaccattaatctggtgaaagatgagcgaataatcgtcacgccaattaacgatatctattacgccgaagcgcacgagaaaatgacctttgtctatacgcggcgtgaatcctacgtaatgccgatgaacattaccgaattttgcagcaaactgccgccgagccattttttccgctgccatcgcagtttttgtgtcaatctgaacaaaatacgcgaaatcgaaccgtggtttaataacacctacattctgcgactgaaagatctggattttgaagtgccggtcagccgcagcaaagtgaaagaatttcgccagttaatgcatctttaatcgggaactttcatgaaagcaccaggcttgcccgccgatcaacaatttttcgccgatctgttcagcggcctggtgcttaacccgcaactactggggcgcgtctggtttgccagccagcctgccagcttgccggtgggcagtttatgtattgattttccccgtctggatatcgtgctgcgcggcgaatacggcaatctgctggaagcaaagcagcaacgtttggtggaaggagaaatgctgtttattccggcgcgcgcggctaatttaccggtcaacaacaaaccggtgatgctgttaagcctggtgttcgctccgacctggcttgggttaagcttttacgatagccgcaccacgagcttgttgcatcctgctcgccagatccagcttcccagcctgcaacgcggtgaaggtgaagcgatgcttaccgccctcacccatcttagccgtagcccgctggagcaaaatatcattcagccgctggtgttaagtttgctgcatctttgccgtagcgtggtgaatatgccgccgggcaatagccagccgcgcggcgattttctctatcacagcatttgtaactgggttcaggataattatgcccagccgctcacccgcgagagcgtggcgcagttttttaatatcacgcccaatcatctgagtaaactgtttgctcagcatggaacgatgcgttttatcgagtatgtgcgttgggtgcgaatggcgaaggcgaggatgattttgcagaaatatcatctgagtattcatgaagtggcacagcgttgcggttttccggatagcgactatttttgtcgcgttttccggcgtcagtttggtctgacgccgggagagtacagcgcccgttttcagggctaacgtcagaaggttaattctgtttccagcagcgtcaggatactttgtgcatcttgcgcggcaaacaagctctggcggaagtttttattcaccagtttacgcgccagctggctgaagactttcacatgattcatcccttcgttagcacccagcgtcagcatgatcaccagttcgacttcgcccatttcactctgccagccaatcggtttcgccagccgggcaatgctgatactggaatgacggatccactgagatttggtgtgcgggatcgctacgccaaaaccaacgccggtggtaacaatctcttcccgctgccagacatcttcttccagctcaaacggatgttcagtgcgcccgttaacgccgaggttgccgcacaggaactggatcgcctgctctttattgctaaaatcctgatcaacaaagatattctccagcgccagcagtgggcgaacgtcttcttccggcgtaaaggcggtgagtaacgcttcaatttcctgcgcactgcggcattcacatgcctgacgcgccagttcccgacacgcctcgctatccagttgacgaagctggcttttcaccgccggaatacgcgggctactcatactcagctcatccaggcccagcccaagcagtagcggcagataacggctttcaccgcccagttcaccgcaaatgcctacccatttgccccgctgatgcgcagtggtaactatttgctgcaacatgcgcaggaagcttggcgtaatcgggttatatagcgggcttacgcgcgggttattacgatcgaccgcatacagatactgggtcatatcgttggagccgatactgaagaaatcgacctcatcgcagaagtggtcgatgatgtagcacacgctcggaacttccaccatgatcccaagcgtaatcgtctctgcatgacgcaggccatcgcgcttaagctcaacgatcgctttttggatctcgcctttcacccataagatctgatcgaggctgtgaaccatcgggatcatcaactgggcgttgccgaaactggcggcgcgcaaaatggcccgcagttgagtgcggaacaggccagcaaattccgggtaaatacgtaccgcgcgatagccgaggaacgggttctcttcctggggaatattcagataaggaatgcttttatcgccgccgatgtccatcgtgcggaagataatcggcttgtcgcccgccgccagtagcacctgctggtaggcttcaaattgctcctgctcgtccggcgcgctgtcgcgatccatatagagcatttcggtacggaacagcccgacaccttccgcgccgttggcaaacgcgcctggcgcttccagagcggtgccgatattcgccgcaatatcaatacgcttgttatcacgggaataggccagctgcgcggcagcctgcgcctgttgtttttggcgtttatccgccagcgtctgcgcgacctgataataaccgctcaccgcgtcattcgggttaatcgccagcacgccgcactgggcgtcaagcactgcaggttgcccggcataacgggcaatcgcatccagcggcaagccactcagtaccgggatcgcgctggcacgggccagaatcagtgtatggctggtgcgcccggttttctccagaatcatgcccgcaagatttttcaaatcaaggctcaaaaactggcttggggttaaatcttcagccaccagaatggtcggtttttcaagcaccagcttgttgcgcggcttcagttccggccaggtgatatgcagcaactgttcgctgatatcgcgaatgtcgctaacacgttcgcgcagataatcgctggcagaggcagaaagtttggcgcaaacctgctccatattgctgatgatcgccgcccccagcccctgatgctgttctgtcatcaggcgacggatattgcctgcaaattcatcatcctgaatcaggctcaaatgggcgctgaggatagttttgctttcgccgtcacgctcacgcaattgctggttcagttgctcggcaagcgttgccaggctgtgctccagccgggtggaatcttgcgcactggcggggattgcccgataactgtcgaggctgtcgctttgtaacagggtcagcgtacccacgccgacgccgcttgccagcacattgccgtacagtaaatccgggttaaggcggcttaaactacgcggcagcggatgcgccgtcagttctgcctgcgtaggctgaacgctgtcgctgtcgataaagcgcacctggatgtactcttccagcacgcgccgcgcctgctcttcatcgctgccgctaatgttcaggctgcaactgtcattaaatagggtgccggtgccaatcagcgccaggctgcttttcgcatctgcctttgcgttctggcgatggttaataaaagtgatttcgctttgccactggctgcactgttctttaagttcccacgccggacgagcatgtagaccgttaggcaaaggacagagaaattgaatcgttaacataaccgctccgggttaatcaggagatcatctgaaatccgtcagttgaacaaccgtctcacgcgtaagacgttgaataagggcagataaaagttgctgcatctgcaaaatgtcgcggcaatcggcaatgcttgcggcgcaatgtccatggcgggttgctggccccatcaccactgtgggcacgccggtgccggttaagtgcaccgccccgccgtccgtgccgccgttgctgaacatatctgcctgcaacggcacgccaatttctgccgccacggtttcgacccaggcggtaagttttggcggcgcaatcaggctcttgtcgcttaacaccagcatcggcccgttaccaatctggcgatggttagccgcgccataatcaaagtttttcgcccagcaggcggtatcaagcacaatggcgacgtccgggctcaccgcgcgggtggcagtttgcccgccgcgtaatcccacctcttcgctggaacttgccaccagccacacttccgcaggtagttcggcgtcgtgcagttcgcgcagtaacgtcaccagcagatagcaaccgaggcggtcatcaaaggctttccccatcactcgctggtgagggagaacctgaaaagtggtatcaaacgtgacgcgatcgccgggacgaattcccgcctgcatcacttcgtcataggagcgcgcaccaatgtccacgcgcatggcgctgacgtcattcccctgccggtcgccgtcaagcaggcctggaattttgcactcttcacgggtggtgatgcgcaccggctgcagctggcgggcagccatgcgtacgttgccaaccggcagcacatcaatcgccccttcgcgggagatgctgcgcaccataaatcccacttcgtccatatgcgcacagatcatcaccttcggacctgtgctttcattcaggcggatcagcacgcttcccagaccatcaaatcgcacttctttttgcaggcgatccgcttcttccagcaggatctgccgcacttcctgttcgctggaggcgatcgcatctgcctcgctcaacgcttttaataggcttaaatccattatgcctctcccgtgagcaacactgttttcggcatggcgtagagcacttctgcgccttgcggggtaaccagcacaacatcttcgatgcgcacgcccccttgccctggcaaataaatccccggctccacggtcagtaacatgcctggctgtagcgtcgtggtgtcccgcggactaaaacgcggatcttcatgaacttcaatgccgatagcgtgaccggtgttatgaccgaaatagtcgccataacctgcttctgtaatgacccggcgcgcggcatcgtcaacctgctggcagcgcacgccggggcgaatcgcggagattgctgcgagctgtgcctgcaggacaatttgatagacgttaaacagcaggtgagattcggcgctcaccccttcgccattcaccagcaaggtgcgcgtcatatcagagcagtagccctgatacagcgcaccgaaatcgagagtgacaaactcgcccgctgcaacaatcttgtcgctggctttgccgtgcggcagcgccccacgccagccactggcgacaatggtgtcaaaagaggctttttctgcgccctgctggcgcataaaccactccagttcagcggctatctcgcgctcgctcatccccgcctgaataaagcggcgaatatgctctgcaccgcgatcagcaatcccacaggcgaggcggattttctccacctcctctggcgttttgatttgccgcagcacatccggcgtggcgctaaccagtttcgcattgagttcagactgccagcggtgcgcggtttcccaactcacctgctggccctcaaaaccgagcgtttgcaactgttcatcggcaatgatttgattgacgatagtggtaagcgtgttcgtcgcgtcaagcaaatgcagctggtagccttgcgcacgggcttccacctcaacgtaatagcggctatccaccagaatgtgcgcactttcacggctaatcaccacataaccacttccggtggagatccccagatgcggctgtttgttctgccgactggagagaagcactgcatccagttgttgcgccttaagccagtcgcgcaggctagcgagtaatgtcatctggattttccttcttacaggctatcgattaacaatttgcctttacggaacatcatcagacgcaggaacaccaccatcagcgcagttatgactgcccccagcgcgatccccgccatatagacgcccaggttagtgaccagcggccatgcccagatagcggactccgggaaccattgcactgcgcccagccagacagcggcggtactgccgacaatagcgccgaccatatagctcggaatggcggtgatggggctttccagcgcaaacggaatcgcaccctcactgatccccataaacgccaggaacatggcggtcttaccctgcggataaagttgagcgttgaacaggcgtttgccggttaaacgacggtcgataatggtcgccagccccagaccaatcggcggaataacgatagcgatagaacgagcggtgaccggtaatacgtggtcagtggtaaagctgaaggcaacaaaacctgcggctttgttgatcgggccaccaaggtcgattgctgtcgccgcggcgatccccattgcgtacatcagcgcgcccttctcacctgcggcagtcagcacagtacggataccgccgttgatccagccaccaaagggggtgatgacgtagtacatcgccagcatgacaaaaatggcggaaagaatcgggagcaaaaatgtggttttgaacgctaacaggaaatccggtaactggattttctggttcatccacttcacaaggtaaccggcaacgatagaaataatcagcgcaccaatgaaggtggacggcaccgggctagaggtcgcccattgcatagtgctgggatcgaagttcagcagttgcgtcggctgggtagacatcaacccgccgataaaaccagccgggaacgccagtttgccaccgatagagttcgccacaaaagcagcaaacatcggaatggcaaaaccaaacaacacgccgccgaaggactggctcagccaggcaaatttaagtaaggagaggtcgaaaccggagaatttcccgctattaagagcatccatgatgccgatctcagcaggaattttaagccagctataagcaatcagctggctgaaagcgaggatcacaccgcccataattaaggtcggcaccatgcgactaatcccactcatcacatgctgcgggagttcaccccagaagctggttttagaggcctgcggattcttaactgccgctgccgcaccggatgcgccaggcacaacggttgcactgcgttttttaatggccataacaattatccctgtcgaatattactgttgttcagaggcaatcatctcttcgatttctttgatgatgcccgcagcgtttttaattgcgtcctgcaaagtgatttcataaacgtcgcgactttcgaaacgttcgttatcttccggggtaactgccacggagtggatgatgatggtcgcttcggcgatatcctgcgccgtcaggcgattctggataccgtccgcgccctgggtttcaattttcacttcataaccggcttctaccgccgcttcttccagcgcctgagcggccataaaggtgtgagccaggcccatcgggcaggcacataaggcaatcagtttcttactcatcgttaattcctcgttcagtgatagttgacgagtgaaattatgaacgtgcaaaacaaatcgccgttaccagacaaataatgcatttactggagaattaatcccgctgtacggaagtgtgacgcaggtcgaccttgtgaggggacacaaagaaaaattgaataaactgtatgatttaaaagattatcgggagagttacctcccgatataaaaggaaggatttacagaatgtgacctaaggtctggcgtaaatgtgcaccggaaccgagaaggcccggattgtcatggacgatgagatacaccggaatatcatggacatattctttaaagcgccctttatcttcaaatgcggcacggaaaccggaggctttgaagaactcaaggaagcgcggcacgataccgcccgcaataaacacgccgccaaatgtcccgagattgagcgccagattgccgccaaaacggcccataatgacgcaaaacaggctcaatgcgcggcggcaatcggtgcagctgtcagccagcgcgcgttcggtaatatcttttggcttgagattttctggcaggcggttgtcagctttcacaattgcgcgatacaaattcaccagcccagggccagaaagcacgcgctccgcgctaacatgaccaatttccgcacgcaatatttcgaggataatggcctcttcttcactattcggcgcaaaatcaacgtgaccgccttcgcctggcaagcttacccaacgcttatcgacatggaccagatgcgcaaccccaagccccgttccggcaccgtaaaccgcaataggcttaccttcgaccggttctgcgccaccaaactgaatcagatgctcttttttcagcatcgggatcgccatgcttacagcggtaaaatcgttaataatttccagatggctaaaaccgagattctttttcatttcggcaatactgaacgcccaggtatggttggtcatcgccacccagtcaccggtaattgggcaagcgatggcaatacagccgtctttcacctcgaccttatgttcttcaagataaacgcgaatgaccgcttcgaggctggggtaatcaagcccactataggtcttagcctggctgatttcaccactggcaatatcacacagagcaagacgtgcgttggtgccgcccacatcaccgactaatgcatactttgtcattcttcaactgctccgctaaagtcaaaataattctttctcacactgtaaatacctgggggcataacaacaacgccggaaaggcaggctccctgtaaatatcgatctgggtcacacaattactttatcgtttcagcaccaattgcagcgatgcctttttgcaagctgggcaaactaagtatctgaccccgcataaggaatagaacacaggcggcactaacccggacgtagactgtattacaaaagcggcaaaaagcagagacaaaaaacccccgctttgcagcgagggttggaaatttggtggagctaagcgggatcgaaccgctgacctcttgcatgccatgcaagcgctctcccagctgagctatagccccacgatgcgtttacgtaccaagtttgctgggtgcaaaatttggtggagctaagcgggatcgaaccgctgacctcttgcatgccatgcaagcgctctcccagctgagctatagccccgtcacgtaaagcttgtcgagttgacgggcggcatcatatgaattccgcccgaatgtgtcaacggcaaattgcaacgtgtagtttcaatcgctgaaaaatcaggcaaatgaacaattttggaaaaccgctcgcattcagtagttattcatgtcacggtttcctgtaaagtggtgttataaaatgaactactaatagacccacatacattcagggaattgttatgttcaaggagaggatgacaccagatgaacttgccagactgaccggctatagccgccagaccattaataaatgggtacgcaaggaaggctggacaacgagtccaaaacctggcgtccagggtggcaaagcccgactggttcacgtcaatgaacaggttcgtgaatatattcgcaatgctgaacgtccagaaggtcagggagaagcgcctgccctttctggtgatgcgccgcttgaagtattgctggtgacactggcgaaagagatgacgccagttgaacaaaaacagtttacatccttgcttctgcgggaagggattatcggattgttacaacgcttagggattcgcgatagcaaataatatgaaaagattacgcaataaaatgaccaccgaagaactggctgaatgcctcggtgtggctaaacaaactgttaaccgttggatcagagaaaaaggctggaaaacggaaaaatttcccggcgtgaaaggcggtcgtgccagacttattctggtcgatacgcaagtttgcgagtttattcagaacacgccagccttccataacacaccaatgttgatggaagctgaagagagaattgctgaatacgctcctggagcacgcgccccggcgtatcgacaaatcatcaacgcgatagataatatgacagacattgagcaggaaaaagtcgcgcaatttttgagtcgtgaaggaattcgcaatttcctcgcccgtctcgatattgacgaaagtgcataaataaaaaacggcaggatattatctcctgccgtttatctttttacacgctaattactgctgattttcgcgttcagcaataaaatccagcgctttgttgatacgctcgatactgcgggtcttaccaattgcgtgaacggtaacatccagtgctggagactgccccgcaccggttacggcgacacgcagcggcataccaactttacccatacccacttccagctcatccgccgtcgcctgaatagcgtgatgaacgttttcagcggtccagtcagtaatcgcggccagtttgtcacgaaccacttccagcggctgacgcgctaccggacgcagatgttttttcgcggcgtcggcatcgaactcagcaaaatcttcgtagaaataacggcagctctgtgccatctctttcagcgtcttgcagcgttcgcccagcagtttcaccagatcagccagctgcgggccgttacgggtatcgatattttcctgctcaatgtgccactgtaagtgagtagcaacatactccggcggcagcgcgttaatgtagtgatggttcagccacagcagcttgtcggtgttgaacgcactggcagatttgctgacggcattcaaagtgaagtatttgatcatctcttcacgagtgaagatttcctgatcgccgtgggaccagcccagacgcaccagatagttcagcagtgcttctggcaaataaccgtcatcacgatactgcattacgctgactgccccgtgacgtttggacagttttttaccgtcatcgccattgatcatagaaacgtgcgcgtaaaccggcaccggcgctttcagggccttaagaatgttgatctggcgtggcgtgttgttgatatggtcttcgccacggataacgtgggtgatttccatatcccagtcatcgacaaccacacagaagttataggttggggaaccatcggtacggcggataataagatcgtccagttcctggttgctgaactcgatcggaccacggatctgatcgtcaaaaacaacagaaccttcctgcgggttagcaaaacgtacaacacacggttcatcatcagcatgatgctcatggctgtggcggcagcgaccgtcataacgcggcttctcacctttcgccatttgctcttcgcgcagcgcttccaggcgctctttagagcaatagcatttataagcagtgccctcttccagcatctgatcgatcaccgcgttgtagcgatcaaaacgtttggtctggtagtacggaccttcatcccactccaggctcagccagttcatgccatccataatggcttcgatagcttccggcgtggaacgctcaagatcggtgtcttcaatacgcagcacgaactcaccgccgtggttacgtgcaaaaagccaggagtaaagagcagtacgcgcgccgccaacgtgcagatagcctgttgggcttggcgcgaagcgagttttgattttcatgaaatggccttacgtttagaaagatgccgacaaccggcaaatcctggaaaaattaagtgggcgatattctatcactcccgcctgattcctcaatgtagttcgggtttctaccttacgcattattgttttcgttgacaaattgcgcaacacggtctgttttgcgatcatcttgcttaaatttacgacgaacgaacaatttctttagaaaatgcgttgactcattttgaactctccctataatgcgactccacacagcgggggtgattagctcagctgggagagcacctcccttacaaggagggggtcggcggttcgatcccgtcatcacccaccaactactttatgtagtctccgccgtgtagcaagaaattgagaagtgggtgattagctcagctgggagagcacctcccttacaaggagggggtcggcggttcgatcccgtcatcacccaccactttctcgccagctaaatttcttgtaaaaatgtgaagtaccgaagtgggtgattagctcagctgggagagcacctcccttacaaggagggggtcggcggttcgatcccgtcatcacccaccacttcgggtcgttagctcagttggtagagcagttgacttttaatcaattggtcgcaggttcgaatcctgcacgacccaccaatgtaaaaaagcgccctaaaggcgcttttttactatctgcgatactcaaagattcgaacctgcagcaggtttgagttgagcgcagcgaaacaacggagccgctcgtgctggcgacggcccgaagggcgagcgaagcgagtcatcctgcacgacccaccaatgtaaaaaagcgccctaaaggcgcttttttgctatctgcgatttgcgaaattgcctgatgcgcttcacttagcagactactatttccggcaattcctgtctcctcacttactgtgtcaatgcagccaacagcttaaccatcgcgggcgtcacctgctgtgtttcataaacaatatataaatctgcagggatgcgctgtttgagcggacggaaaatgacacctggccagttcatttgtgcgtagctgtccgctatcaatgtgataccaatgcccatactgaccatagcgagtaccgtttgcggttcattaacttcgcgaataacaaccggactaaatcccacctgctggcaaactcgctgcaaaaaatcccagtcagtgtaaacgggcggcattgtaacaaaatactcgtcacgtagcgcttccagcgggacggtggaaaaactactgagatgatgctcttcaggcatcgccaccagaaacgcgctttcatgcaaccgtaagctggtaaaaccagtcggtggttctgtcgccattcgccagatcccggcatcaagttcgcggcgttccagcaaggccatttgcatcgcgggcatcttttcgcgaaaaagaacgtcaacgttaggattttccctgaggaatcgccgcataaccgggcgcatccgtccccacattgccgttcccactacgccgagttcaatccgccctgcttctccccgacctatttgttcaatccgagccaatacattattagcattcaccagcaatcgacggctttcttccatcaagattttgcccgcgtgtgtcagtacgacgctgcggctatggcgaataaaaagctgcgtgccgagttgattttccagctctttaatatgaatgctgagcggaggctgagacatatttaaacgcgctgctgcgcggccaaaatgcaactcttccgctacggcaagaaaataacggagcaacttaagatctgttctgtatacgcgttccataattaagtgctccatataataaatacatcgtattaaattatcatggcataaagtatttcaccaccagatatccgacatacataaacacaatggataatatacccggtaatacatttggtacaggaataggcaagcgcacgattgtaaacaaagcaccaataccaaaaccaacgccggaagaaaataaaatatctttcactaattaacctttatcataaaagcagctctgaagagcagagccgcgaatccttttaatgagtcaccgctcgatgctttatcttttcagggtcatgattatatttaaacccaaagaaaaatatcactgcgagaaaaagagcatatcctgcaaacaccagccagatagtttgccagtcttttacgccatccacgctaaagtaatctactgccatgccactcagaatgctgccaacccatgcgccgacaccatttaccatggtcataaagagcccctgcgcgctggcacgaatgctggaatcaacttcctgttcgacaaatacgctaccagaaatattgaagaaatcgaatgcacagccataaacaatcatgctcagcagcagcaaaataaatccggttgtactcggatcgccataggcgaagaagccaaagcgcagcgtccaggccaccatactcatcagcatgacggttttaatgccaaatcgctttaaaaagaatgggatagtcagtataaagcccacttctgccatctgactaacactcagtaaaatggagggatatttcaccacaaaactgtcagcaaactccgggttacgggcgaaatcatgtaggaacggattaccaaaaacgttggtaatttgcagtaccgcacccagcatcatggcaaagaggaaaaagatggccatgcgtggatttttaaacagcacgaaggcatccagacccagcttgctggcaaggcttgtggtcgcttttttctccgcaaccggaatcttcggcaaagtcagcgcataagcgctcagcagcaaactcgcaccggacgcgatatacagctgcagactactcaattccagatgcagcaggcttactgcccacatcgcgacaatgaaccccaccgtaccaaaaacgcgaatgggcgggaaagcggtcaccgggtcaagccctgcctgggcaagacaggaataagagacgctgttgcttaacgcaatagtcggcataaacgccatcgcattgactaacatcacccaaaacatcatatccggatcagttacggatgccgcataaaaaagtacgcccgcacacaccaggtgacacagcatgtatgcacgttctgcgcgcagccatttgtctgcgatgatccccattataccaggcataataatcgcggcgatccctttggaactgtaaaccatgccaacattagcgccggtgaaatgaagagtattaatcatgtaagagccgagggtaaccagccagctcccccagataaaatattgcaaaaaggacattacctttaagcgcatcgcgatgctcataatcgtttccttgtcgcatcatttggcctcacccgcgaggccgtttcttattgtttttctcaggcaattttgcgcagaaagccacaaataaggttgatgaagttctgcttagagagctccgcagccgccagcgtttgcgcatgactcaatttcacatcgcttaaaccttccgccatattggtaatcgcagagaccgcaacgactttaaggtcgcaatggcgagcactaataacctcaggcaccacagacataccaacaacatccccaccaataatttgcatcatgcgaatttccgccgcagtctcgaaattcggccccggatagctgacgaacacgccctccgtcagagggaaaccctcttctttcgccactttttgtaacagtgcgcggtattccgcatcgtaggcatttgccagactgaagaagcgctctccaaaacgatcatcgttaagacccaccatcggcgtaccgggcatggtgttgatatgatctttcaatgcgaccaggctgcctgcccccacttccggacgcaggctgcctgccgcattggtgcagaacagtagctcgcagcccagcagcttaaaggtacgaattgcgtcagtcataatggtcattccacgaccttcgtagaaatgtccgcgacctttcatacataccaccggtacgccctggagatggcccagcactaactcccccgcatgaccatgtaccgtacttaccgggaagcccggcagcttttcgtaggaaattgcgacagcgttctcaatctgatcggccagcgcgccgagcccggaacctaaaataaaggccactcgtggcgtgaaatcaggtttataagtcttgataatatctatgcaaaacagcgggttatgagaaaattgaacctgagacatacatatcctttttctgtagggtggaatctaacgcctttttatagcgaggttgtcccggctcttaccaatacacttttctcacgcattcaatagcgattcgatatcgatggatttatatcttttctctattaatccacggtaaaaactgtattggcgatattaattcctttgcattaacaatatgtcgtttttagcaaaccactttattaagcaatctactaataacgatcggcatagggaattatgctatgaaaaaacatcttttaactctgacactttcctctatattagcgatacctgttgtatctcatgcagaatttaaaggcggttttgcagatatcggcgtgcattatctggactggaccagccggactaccgaaaaaagcagcaccaaaagtcacaaagatgattttggttatcttgaatttgaaggtggcgctaactttagttggggagaaatgtacgggttcttcgactgggaaaacttctataacggtcgccataataaaccaggtagcgagcagcgttatacctttaaaaataccaaccgtatttacctgggtgacaccggatttaatctctacttgcatgcgtatggcacctacggttctgcgaatcgcgtgaatttccacgacgatatgttcctgtacggtatcggctacaatttcaccggcagcggttggtggttcaaaccgttctttgctaagcgttatacagatcaaacctattacactggcgacaacggctatgtcgccggctgggttgcaggttacaactttatgctgggcagcgagaaattcactcttaccaactggaacgagtacgagtttgaccgtgacgctacctatgcagcgggtaatggcggtaaagaagggctgaatggcgcagttgcactgtggtggaatgcaacaagtcacattactacggggattcagtatcgatatgcggatgacaaactgggcgaagatttttaccaggatgcgataatctactccatcaaatttaacttctgattgattactgccggggctcccggcagtatgaattcactttatatctgatacaacggatccccttcccgcccagccattagcgcattgccctggtctcgtaccacgtcccataaagcttcagcggcggtggaaagactacggttcttcctgcgcaccagcatcaactggcgttcaacaaccggcgtaatgcgctttaccaccagtgggctaccttcaggcaatggtagcgccagtgcgggaagaatactgatgccgatgcctgcggctaccatcgggaacagcgtcgccggatgtccaatctcctgcacaatattcgcctgaataccattgcgcgccagcgctgcgtcaatcagcggtcggctgccactcgcgtaatcctgcaacaccaatttcgctccctgtaatgcctgccagggtacataatcttccacggccaaagcgctatcgcgatggcaaagcagaaagaaaggctcggaaagaatcgcttcacattgcagatcgcccactgggcctggatcgatgacgatgccaaaatcgacatctccctggcgaatactttccattacccactgctgcggacgatcgtgcaggacaaactgaatatctggatagcggcgatggctttcagcaatgcattgcggaataagatgcgcggaaatggtctggctggcagcgacccgaacttttccgctcagttgttgccccatacgcccggtatcgcgcaacgtgctgttcagttcatccagcagtcgctcaagacgcaaagccagctgctgccctgcatctgtaagcaccacttcacgcgtggttctgtccagcaggcgaacaccagtatgattttccagttccttcacactgtgactcactgcgctctggctcaggccgatacgctctcctgcacgactaaaacttttctcctgcgctactgtgacgaaaacctttaattgttttaaagaataattcatctgttttcttcatgaatggatgcaataaatcaattttatttctcaaactggaagaagcacaatagaaccatcgatcatctggagtctttatgaaactttttcgtatcctcgatcctttcaccttaaccctgatcacggtggtgttgctggcctctttctttccggccagaggcgatttcgtccccttctttgaaaatctgaccaccgcagctattgccctgctgttctttatgcacggcgcgaagttgagccgtgaggcgattattgctggcggtggtcactggcgactgcatttgtgggtaatgtgcagcaccttcgtgctgtttccgattctgggtgtactgtttgcctggtggaaaccggtaaatgtcgacccgatgctctactccggttttctctacttgtgcattctcccggctaccgtgcagtctgcaatcgccttcacgagtatggcgggcggtaacgtcgcggcagcggtttgttctgcgagcgcatccagcctgctggggattttccttagtccattgctggttggtctggtgatgaatgttcacggtgcagggggcagccttgagcaggtcggtaaaattatgctgcaactgctgctgccgtttgtgttggggcatctttcccggccgtggattggtgactgggtgagccgcaataaaaaatggattgcgaaaactgaccagacgtccattctgttggtggtttatacagcgttcagcgaagccgtcgttaatggtatctggcataaagttggctggggaagtttgctgtttatcgtggtggtcagctgcgttcttctggctatcgtgattgtagttaacgtctttatggcacgccgactgagcttcaataaggcagatgaaattactatcgtcttttgtggtagcaaaaagagtctggcaaatggcatcccgatggcaaacattctgttccccacaagcgtgatcggtatgatggtgctgcccctgatgattttccatcagatccaattgatggtctgtgcggtgctggcgcgtcgatacaaacgccagaccgaacagttacaggcgcagcaggaaagcagcgccgataaagcttaaagcggacgcttcaggggctggaccagttgcgtcagcccctcggttttaatcagcagcgtgatttgcattagctcaccgagcttccctgccgggaactcatctttgcgggcaaaccacagcagatactcctccggcaggtcgattaagcgacgccctttgtatttgccaaacggcattatcgtattggctatttcaatcagctgctctttttccatctcagctacccagcaaacgcagcatttccgcttcgtcgatgacttcaatgcccagttcctgcgccttcgccagtttagatcctgcagcttcacccgctatcaccagatcggttttcttgctcacgctgcccgcgactttcgcgcccagttcgaccagtcgagctttagcgtcatcacggctcatctggcttaagctgcccgtaagcaccacggttttaccagcaaacgggctgtcaatctcttccgcgttgataacgatcggcgcaggccagtgaacaccttccgccaacagctcgctgatgacattgcggttgctttcttcggcaaagaagttgtgaacgtgggatgcaacgacaatgccaacatcaggcaccttttgcagctcttcaatgctagcggcttccagcgcttccagcgtgccgaaatatgccgccagacctgctgcggtggcctcgccgacttcacggatgccaagtgcatagaggaagcgagcaaaggtggtttctttcgctttttccagcgcgttaaccacgttttgtgcgctttttggccccatacgctccagtccggtcagtttgcctgcggtgagtttgaacagatctgccggagtatggacatattctttttcaaccagctgatcgatgattttgtcgcccattccgtcaacatccatcgcacggcgggaaacaaagtgtttcaggctctctttacgctgcgcaccgcaaatcaggccaccggtacagcgggcaaccgcttcaccttccacacgctcaacgtcagaaccacataccggacaatgcgtcgggaatacaacctcacgggtatcttccgggcgttcagaaagcacgacgttaaccacctgcgggatcacgtcgccagcgcggcgaatcaccactttatcgccaatgcgtaaaccaagacgttcgatttcatccgcattgtgtaaggttgcgttactcaccagcacgcctgcaacatggacaggttccagacgcgcaacaggcgtaatcgcgccagtacgcccaacctgaaactcgacgtcacgcacaaaggtcatctgctcctgcgccgggaatttaaacgctaccgcccagcgcggggcacgcgcgacaaagccaagctgctcctgctgtgccagactgttgaccttaatcaccacgccgtcgatatcaaagcccagcgtcgggcggtcttcttccactttgtgatagaacgccagcacttcttccgcgctttcacaaagcgttacccgatcgctgaccggcaacccccactttttaaattgcagtaaacggccaagatgagtatccggcagctcgccaccttccagaacaccaacgccatagcagaaaaaagtgagcggtcgcttcgctgtaatacgcggatcaagctgacgcagactaccagctgccgcattacgtgggttagcaaacactttcccgcccgtgcgtcgcgcatcttcgttaatcttttcgaaccccgcctgcggcaggaacacttcaccacgcacttccagacgcgccgggatattctctccgtgcagcttcagcggaatggcgcgaatagtacgcacattagacgtgatatcttccccggtggtgccatcgccacgggtcgcggcactgactaaaacgccattttcatacagaatactgacggcaagaccatccagcttcagctcacagcaccaggtgactttctcgttgtttttcagacggtcctgcacacgtttgttgaaagcaagaaagctttcttcatcaaaaacgttatccagactcagcattggtacttcatggcgtatctggctgaaagccgccagcggcgcagcgcctacacgttgagtagggctatcaggcgtaatcagttctggatgtttggtttccagctcgcgcagttcgcgcatcagcctgtcgtattcagcgtcgggaatttccggcgcatccatcacatgataaagatattcatgatggcgaagcgtcgttcgcagttctgtcagttgttgttcgatactttccatatcgcaccatcaatgctaaaaacccccgacaagcgggggttcgaagaggagttaatttgccttaagtgtatcaggcgttggcgtctttgacttcgcggatgatgtcctggtactcgcgcaatttctgcggagtcatcatacggcgctgatcgtcaagcacgacaccgcccacttcatcggcaatatgctgcgcagattgcagcatcagcttgaagttctgcagctcgtcaccgtaagacggtacctgcataaagatagtgacacccggagtagtgaaatccttcatttcaggatcaaaggttcccggtttcaccatattcgccaggctgaataacgccgggccgctgccatccgggctaagatgacgatggtaaatattcatatcgccaaaaatgaagcccgcttgttgaatgctgttaagaagcagttcaccgtttagctcgctaccgtgatgcgccgcgacgttcatgataatcaccgcttctttgcgcttcggtttatccataactggagcaggttccgctacaggctcaggctgtggtgccgctacgggttctgcaggctggaaagcctgttgtgccggttgcggtgcactatgcacaggctgcggcgctggcgcgacctgtgggctaactggctgctgcaacggctgttcaggctgcggctgataggcaggctgctgcaccggctgcgctggatgcggagcatgttgcggcggtacctgcgcttcaggcggctgctggaccggttgacgcggctgcgcagacgcataaggcggttggtactggtgttgcgggctcggacgagcagcctcatgctcctgagcgttagccggggcatgattcacgcggtgaacacgaacctcaccaacgccctcatcatcttcgacatcctcgtcataagaatcgtcgtcacgtttactcttcattcgttttaatggccgatcgcggaacatagaagatcgttctttacggctggtccagaaaccatgtaccagtaaagcgattatggcgatcgcgccaacaatgattaatatcagacgcaaatcctgcatcattatattctctgttgttctaacaccttgccaccacggcaaacatttactcactaagagtatttgccgattacctcaagtgcaagtgcactattaactttcacagcacaaagatagatgaaatcgtgctttttgctgttttttcgaacatatcctaactgtccattgcgcaattacccggtaaaatacgcagaattttcctgggattggtcaaaaggagctcatcctgattatggttagtagtttcacatctgccccacgcagcggtttttactattttgcgcaaggctggaagctcgtcagccaacctgggattcggcgtttcgttattttaccgctgctggtcaatattttgttgatggggggcgcattctggtggctctttacacagctcgatgtctggatcccgactctcatgagttacgttccggactggctacaatggctgagttatctgttgtggcctctggctgtcatctctgtgctgttagtgtttggctatttcttctccacgattgctaactggattgccgctccgtttaacggtttattggctgaacaactggaagcacgattgactggcgctacaccgccagataccgggattttcggtatcatgaaagatgtgccgcgaatcatgaaacgcgaatggcaaaaatttgcctggtatctgccgcgcgcaattgtattactaattctttacttcatccctggtattgggcaaaccgtcgcgccggtactgtggttcctgtttagcgcctggatgttagccatccagtattgcgattaccccttcgataaccacaaagtgccgtttaaagagatgcgcaccgccctgcgcacacgcaaaatcaccaatatgcagtttggtgctttaaccagcctgtttacgatgatcccgctgcttaatctgttcatcatgcccgttgccgtttgtggcgcgacggcgatgtgggtcgattgctatcgcgataaacacgcgatgtggcggtaacaatctaccggttattttgtaaaccgtttgtgtgaaacaggggtggcttatgccgccccttattccatcttgcatgtcattatttcccttctgtatatagatatgctaaatccttacttccgcatattctctgagcgggtatgctacctgttgtatcccaatttcatacagttaaggacaggccatgagtaagatttttgaagataacagcctgactatcggtcacacgccgctggttcgcctgaatcgcatcggtaacggacgcattctggcgaaggtggaatctcgtaaccccagcttcagcgttaagtgccgtatcggtgccaacatgatttgggatgccgaaaagcgcggcgtgctgaaaccaggcgttgaactggttgaaccgaccagcggtaataccgggattgcactggcctatgtagctgccgctcgcggttacaaactcaccctgaccatgccagaaaccatgagtattgaacgccgcaagctgctgaaagcgttaggtgcaaacctggtgctgacggaaggtgctaaaggcatgaaaggcgcaatccaaaaagcagaagaaattgtcgccagcaatccagagaaatacctgctgctgcaacaattcagcaatccggcaaaccctgaaattcacgaaaagaccaccggtccggagatatgggaagataccgacggtcaggttgatgtatttattgctggcgttgggactggcggtacgctgactggcgtcagccgctacattaaaggcaccaaaggcaagaccgatcttatctctgtcgccgttgagccaaccgattctccagttatcgcccaggcgctggcaggtgaagagattaaacctggcccgcataaaattcagggtattggcgctggttttatcccggctaacctcgatctcaagctggtcgataaagtcattggcatcaccaatgaagaagcgatttctaccgcgcgtcgtctgatggaagaagaaggtattcttgcaggtatctcttctggagcagctgttgccgcggcgttgaaactacaagaagatgaaagctttaccaacaagaatattgtggttattctaccaagtagcggtgagcgttatttaagcaccgcattgtttgccgatctcttcactgagaaagaattgcaacagtaatgccagcttgttaaaaatgcgtaaaaaagcacctttttaggtgcttttttgtggcctgcttcaaactttcgcccctcctggcattgattcagcctgtcggaactggtatttaaccagactaattattttgatgcgcgaaattaatcgttacaggaaaagccaaagctgaatcgattttatgatttggttcaattcttcctttagcggcataatgtttaatgacgtacgaaacgtcagcggtcaacacccgccagcaatggactgtattgcgctcttcgtgcgtcgcgtctgttaaaaactggcgctaacaatacaggctaaagtcgaaccgccaggctagactttagttccacaacactaaacctataagttggggaaatacaatgttccagcaagaagttaccattaccgctccgaacggtctgcacacccgccctgctgcccagtttgtaaaagaagctaagggcttcacttctgaaattactgtgacttccaacggcaaaagcgccagcgcgaaaagcctgtttaaactgcagactctgggcctgactcaaggtaccgttgtgactatctccgcagaaggcgaagacgagcagaaagcggttgaacatctggttaaactgatggcggaactcgagtaatttcccgggttcttttaaaaatcagtcacaagtaaggtagggttatgattagtggcattttagcatccccgggtatcgctttcggtaaagctctgcttctgaaagaagacgaaattgtcattgaccggaaaaaaatttctgccgaccaggttgatcaggaagttgaacgttttctgagcggtcgtgccaaggcaagtgcccagctggaaacgatcaaaacgaaagctggtgaaacgttcggtgaagaaaaagaagccatctttgaagggcatattatgctgctcgaagatgaggagctggagcaggaaatcatagccctgattaaagataagcacatgacagctgacgcagctgctcatgaagttatcgaaggtcaggcttctgccctggaagagctggatgatgaatacctgaaagaacgtgcggctgacgtacgtgatatcggtaagcgcctgctgcgcaacatcctgggcctgaagattatcgacctgagcgccattcaggatgaagtcattctggttgccgctgacctgacgccgtccgaaaccgcacagctgaacctgaagaaggtgctgggtttcatcaccgacgcgggtggccgtacttcccacacctctatcatggcgcgttctctggaactacctgctatcgtgggtaccggtagcgtcacctctcaggtgaaaaatgacgactatctgattctggatgccgtaaataatcaggtttacgtcaatccaaccaacgaagttattgataaaatgcgcgctgttcaggagcaagtggcttctgaaaaagcagagcttgctaaactgaaagatctgccagctattacgctggacggtcaccaggtagaagtatgcgctaacattggtacggttcgtgacgttgaaggtgcagagcgtaacggcgctgaaggcgttggtctgtatcgtactgagttcctgttcatggaccgcgacgcactgcccactgaagaagaacagtttgctgcttacaaagcagtggctgaagcgtgtggcagccaagcggttatcgttcgtaccatggacatcggcggcgacaaagagctgccatacatgaacttcccgaaagaagagaacccgttcctcggctggcgcgctatccgtatcgcgatggatcgtagagagatcctgcgcgatcagctccgcgctatcctgcgtgccagcgctttcggtaaattgcgcattatgttcccgatgatcatctctgttgaagaagtgcgtgcactgcgcaaagagatcgaaatctacaaacaggaactgcgcgacgaaggtaaagcgtttgacgagagtattgaaatcggcgtaatggtggaaacaccggctgccgcaacaattgcacgtcatttagccaaagaagttgatttctttagtatcggcaccaatgatttaacgcagtacactctggcagttgaccgtggtaatgatatgattagtcacctttaccagccaatgagtccgtccgtgctgaacttgatcaagcaagttattgatgcttctcatgctgaaggcaaatggactggcatgtgtggtgagcttgctggcgatgaacgtgctacacttctgttgctggggatgggtctggacgaattctctatgagcgccatttctatcccgcgcattaagaagattatccgtaacacgaacttcgaagatgcgaaggtgttagcagagcaggctcttgctcaaccgacaacggacgagttaatgacgctggttaacaagttcattgaagaaaaaacaatctgctaatccacgagatgcggcccaatttactgcttaggagaagatcatgggtttgttcgataaactgaaatctctggtttccgacgacaagaaggataccggaactattgagatcattgctccgctctctggcgagatcgtcaatatcgaagacgtgccggatgtcgtttttgcggaaaaaatcgttggtgatggtattgctatcaaaccaacgggtaacaaaatggtcgcgccagtagacggcaccattggtaaaatctttgaaaccaaccacgcattctctatcgaatctgatagcggcgttgaactgttcgtccacttcggtatcgacaccgttgaactgaaaggcgaaggcttcaagcgtattgctgaagaaggtcagcgcgtgaaagttggcgatactgtcattgaatttgatctgccgctgctggaagagaaagccaagtctaccctgactccggttgttatctccaacatggacgaaatcaaagaactgatcaaactgtccggtagcgtaaccgtgggtgaaaccccggttatccgcatcaagaagtaattcttgccgcagtgaaaaatggcgcccatcggcgccatttttttatgcttccgccagcggcggcaaaatcaattcatcgctctcatgctgctgggtgtagcgcatcacttccagtacgcgcaaccccgctcggtgcactgcatcggttaacgccttccctttcagcaagccactgatgagctgagcacaaaacaggtcgccagtccctttcaggtcggtttttacccgactatgggaaatgacattcacgctgtcggcagtgaccaccacaacctgcatctcctgattttcttcattaccggaggcgctggtaaccaccacccattttaatgtgtcactaagcagactttttgcggcagcaatggcactgtcgagatcgcggcaatttttaccggtcaggatttccaactcaaagatattgggggtaattccctgcgccagcggcagtaaatattgtcgatacgcttcgggaaggtcaggtttgacataaattccgctatcaatatcgccaatcaccggatcgaccatgatcaataggtcaggatggtctttgcgtagcgcagtcagccactcggcaaggattttgatttggcttgccgttcccatatagcccgtggttacagcacgaagttggcgcagcgcatcacgctcctgaagcgcacgcaaatagccgctaaaccattcgtccggaatcgcaccaccgtagaaagtgtcataatgcggcgtattgctcagcaataccgtcggcacggcaaagacattcaggccgttctgtttgatagcaggcacggcaatgctgttgcccacgctgccgtaaaccacctggctctgcacggcgacgatatccgcctgcagtgccctactcttatcgttaaacaacaacaaactactcatttaattttttctccttgccgatgatcctcatcgtaatccaaccgaaactttacctgattctggcagtcaaatcggctatcacaaaacaaggataaggtaattcaatgaagaaaatcatttgtctggtcattacactactaatgacactccccgtttacgcgaagttaactgcccatgaagaagcccgcatcaacgccatgctggagggattagcacagaaaaaggatttgatatttgtgcgcaacggtgatgaacatacctgctatgaagcggtttctcatctgcgtctgaagctcggcaatacccgtaaccgcattgacactgccgagcagtttattgataaggttgctagcagcagtagcattactgggaagccgtatattgtgaagatccccggtaagagcgatgagaacgcacagccttttttacatgcgttaattgcgcagacggataaaacggtgcctgcggaaggaaattaatccgctttgggaaggcatttacaggaggtaacatgaaaaaacgctttatttatcacgatgaaaaaagcaataaattttggtggatagattacgaaggggatagtttagctgtcaactatggcaaggtaggtagtattggtaaattccagacaaaagagttcgataatgaagaacagtgtctgaaagaagccagtaaattgattgccgcaaaaatgaagaaaggctatcaagaagatccaaagtttaacttcatggatcgctactattttgatgatgaagaaattgggttacatgttaaaacgagtcacccaaacttccagtgccattttactgatccactttatatgtgttgctgggatgaagaatctccttttggcagcgatgaaggtgctgatgctctaaacgttcttgaaaatagcctccgtaaagagccggatctggactgtgctgatttccctcaaatgttaattgaaactatgtggggtatgaaatacatcgctatggacagtattcttgaagaggatgttcgtgcgcaattactagtcgatgaaatgagcactatccagagcaatatgattacctacgcaactgcattcggtcagattaaagtcatgggtaaaatctcccataaacttaaaaagatgggactcaatgcactagcgcgtcatcagcttaccgcaaaaattcttcaatggggtgacggtcaggacagtccaatacttcaaaaaatgattgatgaccttacggcgtttcctcacgaaaattaaatactgcatttgtcggcagcaacaactgttaaaaaagtgcgctttgtttatgccggatgcggcgtaaacgccttatccggcctacaaaatcgtgctaattcaatatattgcagaaaccttgtaggcctgataagcgtagcgcatcaggcagttttgcgtttgtcatcagtctccgatgctattaatccttaaatccccgccccctggctaaaatgctcttccccaaacaccccggtagaaaggtagcgatcgccacgatcgcagatgatcgccaccaccaccgcgtcagggttagcttttgccacccgcagtgctccggcaaccgcgccgccggagctgacgccacagaatattccttcccgcaccgccagttcgcgcatggtgttttccgcatcgcgctgatgaatatccagcacctcatccaccagagaagcgttgaaaatccccggcagatattccgtaggccagcggcgaatgccgggaatgctgctgccctcttccggttgcaggccgacaatggtcaccggtttggattgttcgcgcataaagcgactgacgccggtgatagtgccggtcgtccccatgctggagacaaaatgagtgatgcgcccgccggtttgctgccagatttccggcccagtggtggtgtaatgcgcataagggttatcgggattattgaactgatcgagcagctttccttcgccacgattcgccatctccagcgccagatcgcgcgcaccttccatgccctgctctttggtgacaagaatcagttccgcaccataagcacgcatcgccgcacggcgttcctggctcatgttgtcgggcatcagcaatttcatgcgatagcctttcagcgcggcaatcattgccagcgcaatgccggtgttaccactggtggcttcgattaagacatcacccggtttaatttccccgcgcttttccgcctcgacgatcatgctaagtgccgcacgatctttcacgctacctgccgggttattgccttccagttttaaccacacttcactgccgttatccggccccattcgctgcaacttcaccagaggcgtattgcctattgtttgttctaatgtactcacgatctctatccatacgtggtgttgcctgatgcgacgcttgcgcgtcttatcaggtctacaggttacaaaccttgccattaaaaagcccggatcgcgggaagcgcctccgggcgtttaacattcactcaacctatcaggcgctttgtgcgagagcaagttcctcatcgcgggtttcgatacgctcgtcgccgttatacagccgcgcatgttgcagaccaacgaataaacgctcgccacgctgcggggcatcgtcgccatgcatcacgaccgtcagcggttcgttgtaccaccccagcggctgcaccactaattgggtgtagtgacctttcgggctggcttccagtacctgtaccggcagcgggctatcgaggctggtacggcggctgatatccacttcccaagggcgcaggaagagatccaccggcccctgatacgcaggtgtgtagcccagcggccagcgatgcgcgccaacatggaactgcccgccgcgaatggttccctgcaggcggttcacttcgcccataaattcgagcacaaaacggatcgccggttcgcgccatacctgatccggcgcgtcagcctgttcaatattgccctggctcatcacaactacacgatcagctacttcggtcgcttcttcctgatcgtgggtcacaaaaacgctggtgaattttagttcttcatggagttgacgcagccagcgacgcagctctttacgcacctgcgcatccagcgcgccaaacggttcatcaagcagcagaatttgcggttccacagccagcgcgcgcgccagcgccacgcgctgtttctggccgccggaaagctgcgccggataacgatccgccagatgggcaagctggaccatttccagcaattttgtcactttcgctttgatggctgcggcattcgggcgctcgcgacgcggcagcaccgtcaggccaaaagcgatattgtcgaacaccgtcatatggcggaacagcgcgtaatgctggaacacgaaaccgactttacgatcacgtgcgtgcaggcggctcacgtcggtgccgtggaagcgaatatgcccgctggtttgatgctccagcccggcgataatgcgcagcagcgtggttttcccggaaccggacggccccagcaacgcgaccatctgaccactaggaatatccagactgatatcgttcagcacctgggtgcgaccaaagctcttcttaatattggcaatctcaatgctcatgatgttcctcctgctgtgcgcgtttttcctgattctccaggcgccactgcaacatactttttaaaaacagggtgataatcgccatcagcgttaacagcgccgcagcggtaaaggagccgacggtgttgtagtcctgctccagcaattcaatctgtaacggcaggctcagggtttcgccgcgaatgctgccggaaaccacgctcaccgcgccaaactcgccaattgcgcgggcgttggtcaacaccacgccataaagcagcgcccagcggatgttcggtaatgtgacgcgacggaacatctgccagccggacgcgccaagcaaaatcgccgcttcgtcttcctggctgccctggcttaacatcaccggcaccagttcgcgcaccacaaacggacacgtcacgaagatggtgaccagcaccattcccggccaggagaacataatttgcaggttatgctcgtcgagccaaccgccgagcgggccgttagagccgtagaacagcaaatacaccagaccggcaaccaccgggcttacggcaaacggaatgtccagtagcgtcagcagtaactggcgtccagggaagttaaagcgcgtcaccagccaggccagcagaatgccgaacaccaggtttaccggtacggcaatcagcgcgatcatcaccgtcagccagatggcgtgcagcatgtccggatcggccagattctgtaaaaccggcatcagccccttgctgaatgcctgcacgaagatgtaaatcatcggcaccagcaggatgaacgcgctaaccagcatcccgatgccaatcagaaaccatttgccccagttaatcgggcgcgcgtcataacgcttcaattgggtaacttccgccattaatgacctaccacacgccgaccaaagcgactttgcagagtgttaatactgaacagcagcagcagagatgccgcgaggatcacgctagcaatcgcgctcgctgccgggtaatcaaactcctgtaagcgcacaaaaatcatcaggctcgtcacttccgtcttccacgcgatatttccggcgataaaaatcaccgcgccaaattcaccaagactacgggtaaagctcagcgccacgcccgccaccagcgccggagaaagctccggcagcaccactttgcagaaactctgccagcgcgttgcaccaagcgtttccgccgcttcttcatattccgggcctaactcttccagcaccggctgcacggtacgcaccacaaacggaatgctggtaaaggccatagccaccgcaatccccagccatgtataggtgactttgatatcaaacttcgccagccattcaccgtaaaaaccgtttacggaaaagaggctggccagcgttaaaccggcgacagccgttggcagcgcaaagggtaaatccatcagcgcatcaagcagcgtgcggcctgggaagcgatagcgggttaggatccacgccatcagcagaccgaaaacgccgttaaaaatgcttgccacaaacgcgctcagcagcgttactttgtaggccgcgaccacctgcgggttggtgatcacctcccagtactgcgcccagctcatctgggccagttgcatcaccagcgcggagagcggcagcagcaaaatcaggcacacaaacagcagactggtgccgaggcttaaggtaaagcccggcagcacgcgtctggaggagacagcaaacatcagttacgccccgccgctaacagcttgtctaactcgccgccgctggtgaagtgggttttcatcacttccggccaggagccaaatttgtcttccacgcggaacagctcggtctgcgggaatttgtctttcagtttgtccatcacctccgggttattcacgcggtagtaatagtcggtgatgatggtttgcgcctgcgggctatagagccagttcagataggctttggcggctttttccgtaccgttggcctgcacgtttttatcaacccacgccaccgggaattccgccagaatgttggttttcggaatcaccacttcaaagccctgcgcttcatactgtttacggatgttgttcacttcgctttcgaagctaatcagcacatcgcccaggccgcgctcggcaaaagtggtggtcgcgccacgaccgccagtatcgaacacttcaacgtttttcaggaactgggtcataaactgttcggttttgcctttgtcaccaccgtcagctttatccgctgcgccccatgccgccagataggtataacgcgcgttaccgctcgttttcgggttcgggaaaatcagcttcacgtcggagcgcaccaggtcgttccaatcgtggatattcttcgggttacccttacgcaccaggaagcccatggtggagtagaacgggctgctattattcggcaggcggctctgccagtcggccgggatcagcttgcctttatcgtgcaggatttgtacgtcggtcacctggttataagtgacaacgtcggcttttaagccctgtaaaatcgccagcgcctgtttactactcccggcatgagattgttttatcgtcagtttgtcgccgccgttatcttttgcccattgttgctcaaacggcggattcagggcggcaaacagctcgcgggagacgtcataagaactgttcagcagttccgttgcctgtacatggcccgccagcagcagagaagcgaccagcgcgagactgttctttttcagtaagttaacggccattgcgcacccttataaatttaatgactttctaatagccatcatatttataacggacgtgaaaggagtaacggttttatataccgtttggtgatttggaagttgaaaagggaataagaacttggttcaacaggcgtaattgttgcagtcagtttggacacgaacagcgcggagaaaccggagcgtacacatagtacgtgaggatttcgagcactgcccggggccaaaatgacaaataaaatagcctggtgaacttagttcaagacgaaatcctccccacaaatgcagggaggaaacagaggtgaatcagataccgacgctaaccgtctccggcagtgtgctgccgccatcaatcacattctgtgtaccggttaaatagctggattcatcgcttgcgaggaaggccgccagttcgccgacttccagcggatcggcgaggcgacgcatcgggattgctttcgccatttcagtcagcacgctctctggatcttccgggttgctctggcgggcaatgctttccgccattggtgtgcgcacgtatcccgggcaaatggcgttaacgcgaataccagactgcgcgtactccaccgccaggctttttgtcaggccaacaatcgccgctttcgttaaggcgtacgccgtttcgccaggatcggccaccatatcaccagtgacactagacatcatcacaatgcgaccatctttgcgggcaatcatctccggcagcaccgccttcgtgacgttccatacgcctttaatattgatgtcaatatggaaatcgcgatcgtcatcgctcatatcgaggaaactgcccagacgacaaacgcctgcgttattcaccaggatatcaatgcgcccttctttttccttcgcgcgtttgatagctgcggctacgctcgccgggtcacgcacatcggcgacaaccgccgtacagcgatgaccacgaccacacagttcgtccgccagcttttcgatctcaggggagatatccagcaagattaggttcgcgccatgacgtgcaaaagttctggcaattccttcgccaattccctgcaatgcgcccgtaatcagtgctgtcttgcccgtgagtttacccattttaatgctctccttgttaatacagagcgttacactccattccctctgaaaatacaggataaacaaaatattgctgcggatcagctcactaattcaggaaaatctcaatccagtcgctgctttatgcatcatttcaggcgttgtgttagctcactgctgcgctgaatcattttcaaactctccacatcattgagttgcacaaggccaacaaacagtaaatcggtaacagaattttgcgccgtgcgggtagacatgctgctgctacgccattcggtttctccggaaacggtatcgagggtgaaatgcgccagccgccgcagcggagagtcagtcagagaagtaatggcaatcaccgttgccccctgctttcgtgccgcttctgcgcacaagacaatctcttttttactgccgctgtaagagatagcgatttgtacatcgccttttttcaacgcctgagaaacggtggcttgtacgtgcgtgtcggcttcgcaggccacgcgatagccaattttcatcagtttgaagctcagatcgcgccccaccagcgcgcttccgcccaggcccgttatctggataaacggtgctttactgatgacctcaatgattttttgcagccgcgcgtaatcgagcaacgcgcaggtttgctccagcgccagctctttttcgcgattcagtttgcgcgcgatcacttccaggctatcatcactggtaatgctactgtgcaggtgcagtgccgtggcattcgttttctcccggctggcactgtattcgcctattaacgccatacgcaattcagtaaatccttgcgcgccgagtttttgggcaaatttcactatgctgctctggctaatgccgagctgtttcgccatctgccgactagaaacggattgcagctcactcacgttggcctgcagaaagtcagcgattttttgctcgttttcggtgaattcactccccgcattgcttattttcgtcaggtacaacatcttccactctcctgggctggcagcataaattccgcttaagttcttatgacgctcttcacactctgcgagtgtagactcaatgattcctttaagcctgtcaattcgggatatatgattccatacatctgcaattatttgatcgtaaatagtaaggtcaccaccgatgcaatttgaaaagatgattactgaaggcagcaacaccgccagcgctgaaattgaccgcgtaagcacgctggaaatgtgccggattatcaacgatgaagataaaaccgtaccgcttgccgttgagcgcgtactgccggatatcgccgcggcgatcgatgttatccacgcccaggtaagcggcggcgggcgtctgatttacctcggtgcgggaacatccggtcgtctggggattctggatgccagcgaatgtccgcccacctacggcgtgaaaccgggtctggtggttggtttgattgctggcggcgaatatgccattcagcacgcggtggaaggcgcggaagatagccgggaaggcggtgttaatgatctgaaaaatattaatttaacggcacaggatgtggtggttggcattgctgccagcggtcgcacgccgtatgtgattgccggactggaatacgcacgccagctcggctgccgcacagtgggaatttcctgtaatccggggagcgccgttagtaccaccgctgagtttgccattacaccgattgtaggtgccgaagttgttaccggttctagccggatgaaagcaggtacagcgcagaaactggtgctcaatatgctttccaccgggctgatgattaaatccggcaaagtgttcggcaacctgatggtcgatgtggtcgccaccaacgaaaaactgcatgtgcgacaggtcaatattgttaaaaacgccaccggatgtagcgcagagcaagcggaagcggcgttaattgcttgcgagcgcaactgtaaaacggccattgtgatggtgctgaaaaatctcgatgccgcagaagctaaaaaacgcctggatcaacacggcggctttattcgtcaggttttagacaaggaataacccatggccaaagagatcagcagtgaacttctgaacaccattcttacccgtgtcggcggaccgggaaatatcgccagttgtggtaactgtatgacgcgcctgcgtctgggtgtacatgacagtagtctggttgatcccaatatcaaaacgctggaaggcgtgaagggcgtcattttgaccagcgaccaggtgcaggtcgtttttgggcctggtaaagcgcatcgtgccgcaaaagcgatgagcgagctgctgggagaagcaccggtacaggatgccgcagaaatcgccgcccagaacaaacgtcagttaaaagccaaacaaacctccggcgtgcaacaatttctcgccaaattcgccaccatcttcacgccgctgatccccggttttattgccgccggtctgctgctggggatagcgacgttaattgccacggtgatgcacgttccggcagatgctcagggaacactacccgatgcgctgaattttatgaaggtgttcagcaaaggtttgttcactttcctggtgattctggtgggctataacgccgcccaggcatttggcggcacgggcgtaaatggcgcaattatcgccgcgctctttttgctcggttataaccccgcagcgaccaccggttactacgccggttttcacgatttctttggtctgcccatcgatccgcgcggcaatattatcggcgtgctgattgccgcgtgggcctgcgcccgcattgaaggcatggtgcgccgctttatgccggacgatctcgacatgctgctgaccagcttaatcaccctgctgatcaccgctacgcttgcgtacctgatcattatgccgctgggtggctggttattcgaaggtatgagttggctgtttatgcacctgaacagtaatccgttcggttgtgcggttttagccgggctgttcctgatcgccgtggtatttggcgtgcatcagggctttattcctgtttacctcgcgttaatggacagccagggattcaacagcttatttcccatccttagtatggcaggcgcgggccaggtgggcgcggcgctggcactctactggcgggcgcaaccgcacagtgcgctacgcagtcaggtacgcggggcgattattcccggcctgctgggcgttggtgaaccgctgatttacggtgtcaccctgccccgcatgaagccgtttgttaccgcctgtttaggcggcgcggcgggcggtttgtttatcggcctgatagcctggtggggtctgccgatgggcttaaacagcgcctttgggccgtctggtctggtagcgctgccgctgatgacttccgcacaaggcatccttccggccatggcggtttatgctggcgggattctggtggcatgggtttgcgggtttattttcaccacgctctttggctgccgtaacgtcaatctggactgatatcatgaaacggacaatgctctatctttctctgctggctgttagttgtagcgtcagcgccgcaaaataccctgttctgacagaaagcagcccagagaaagcagggtttaacgtcgaacggcttaaccagatggatcgctggattagccagcaagttgatgtcggttatcccagcgtaaacctgctgatcattaaagataatcagattgtgtatcgcaaagcctggggagcggcgaaaaagtacgatggcagcgtgttgatggaacagcctgtcaaagccaccaccgggacgctgtatgacctggccagtaacaccaaaatgtacgccacgaacttcgccctgcaaaagctgatgagcgaaggcaaactgcatcctgacgatcggattgcgaaatatattccggggtttgccgatagtccaaatgacaccattaaaggcaaaaacaccctgcggatttctgacctgctgcatcacagcggcggtttcccggcagatccgcaatacccgaataaagcggtcgcgggcgcgttatattcccaggataaaggccagacgctggagatgatcaagcgcacgccgctggaatatcagcccggcagcaaacatatctacagcgatgtcgattatatgctgcttggatttatcgtcgagagcgttaccggtcagccgcttgaccgctatgttgaagagagcatttatcgcccgctcggcctgacacatacggtatttaacccgctgctgaaaggctttaaaccgcaacaaattgccgccacggaattgaacggcaatacccgcgatggcgtgatccatttcccgaatatccgcacctccactctctggggtcaggtgcacgatgaaaaagccttttatagcatgggcggcgtttccgggcacgcaggtttgttttccaataccggcgatattgcggtgttaatgcaaacgatgctgaacggcgggggctatggtgatgtgcagctgttcaatgcggaaacggtgaagatgttcaccaccagctctaaggaagatgccacttttggcctcggctggcgcgtgaatggtaatgccaccatgacgccgacgtttggcacgctggcaagcccgcaaacctacggtcacactggctggaccggaacggtgaccgttatcgatccggtgaatcatatgacgattgtgatgttaagcaacaagccacatagcccggttgccgatccgcaaaagaatcccaatatgttcgaaagcggtcagttgccgattgcaacttatggttgggtagttgatcaggtgtatgcggcgttaaagcagaagtaataaaaaggccagtcagtaatgttactggctggtctgagagtgctgacaaacgcaaaactgcctgatgcgctacgcttatcaggcctacgtggagcccacaatatattgaattagcacgatttcgtaggccggataaggcgttcacgccgcatccggcgtgtacaacgcgcacttggtcaacaatctgaggccagtcagtaatgttactgcctggcctttaatcaatgaatcagaaacgcttacagcgccatcaacttgtccaggctcggtgcgaaataatagccgccggttaccggtttggtgaaacgcaacatcgcatcacgcttaccatcggtatcgccaaacatgctcagcagttgctgctcaatgttatgcagacgcgcgcagtaggcgcagaagtacagaccgtgagtgccactggcagtgccgtacggcaggctctggcgaacaatcttcagccctttgccatcttctttcagatcaacgcgggtgaggtgagaggtttccggacgttcgtcgccgtcgatctcttcgttggcctctttggtgcgcccgatcaccatctcctgatcgtgaacgctcatccggttgagctgcttcaggttgtgttcccaacgctggacaaacacatagctgccgcccgcatccacgccgtctttgataaccgccacttcgcgacgcgtctcttcacccgccgggttttccgtaccgtcaacaaagccgctcaggtcacgctcttcaacccaacggaagccgtggatctcttctttcacttcaatgcagtcaccaaaggcttccatcgccgcctgggcgacagagaagtttacgtcgtgacgcagagaaagaatgtggatcaacacatcgaactgggtcgtcggcgcaaggcctttaccgtagcccggaaaatctttcagctcttctgccccaacgccgccgctcagagcgcgccaggtgttgttaccaaaggcaaccaccgcaccaagatgcgcgtccgggaatttcgcttcaaaagttgccagtttgtcggcaaatgttttactggccgcacgcagggcgtcaacttcccctttcacgttggcttcgatccaaatcgccgcgcggcaatgttctggcaaaatgccactctgaacctgagacattgttcctcctgaaaataataatgccacgcaatccgtggcattgttgagcgctattttacgtgttttttcgcggcggcggtttgttcagacgcaaattaacgccgccagataattttactgactttccagtttttcagggtatcgtcgctaggcattaacccttcaggaccacgccattccccgctgaactggtagctaatatgttgactgccttcggctttacattcgacggcacgattatcatcaccatcagctttttggcaattgccaaatgctttgctgtaaaggtcgctaaacggtgtaccgattttaacaccggtgtcagcaggaatatcgctatccagcacgtcaatgcgactgatcgtgccttgatcgccgttaatcaccatcgccacgttgtcgcccttcatcacttcaaaaaagcgcaccacgttgccgttcgcggttttcattccgctgcgcaggcgataatcgccatcaagcgcatcggcaatggcttgttcttgcagtggtgtggacgccgttaattcacccacgccctgctcgctcactttggtggagctcccaaaccagttccacgggttagcggcagaccagttaacactgctcatcgtggaacagccggtcagcatcaatggcatagcgcataacattaaacgcaggcttttcatgtcacttcctttggttattcaataacgttgcttggagtgcaaattcaccaaaaagtgccgttattcttttacttcataaaaacaagcgcgtaaacgtcgattggtcagcagccagattaacgccacaatatccgccactaccagcgccagaccgataccgctaacggattcaccgttcagccacagccacggttgccagcaaagtaaaaccacctgcgccaacagcaacagaaaatagagtacacgccaggtgcgaggaaacgtagcccgccgaccgctcaacaaaaacgccagcaccgccggaatgccaggaatcagccccagccagaaattatcgtgatcgggataaaacagatttagcagcgcagtaccctgctcgcggctcgcaccggcaatgacaaacagcacccaggttcgcgcctgaagcaatagcacaagccagaagagcaagggtaaacgcaggcgaccgtgcgcatcataatggacaggatgaaactcagtactcttcatcttcaatcaaacgcttacccagactcagcacgtcggcgtgttcatatcccaggcgttcatacattccgagcaccatgtcgttatcttccggcacattgatctgaattttcgggcagccacgagcaatcagctttttctccagccgattaagcaacgcattggcaatcccacgcccacgaaactctggatgcacgccaagataataagcagacccgcgatgcccgtcataaccgcccatcaccgttccgaccacgtcaccgtttacctcagcgaccaaaaacaaactgacgtcatggttcatcttacgctcgatgtccatttccggatcgttccacggacgcagcaagtcgcaacgctcccaaagggtgatgacctcttcgaaatcttcctggcgaaatacgcgtatctccatggtattcgttacctttttgcgggttaaaaggctgattatggcgtgaacggtcgaattagccaatatctgacgaaaatcggttgaaaaagtggcataatggggagttgtcaactattgaaatgaaaagtaaaacaattctcaacagcaaaccgtcgtaacggattacgcgatacgatataacatctggaactttattattacaactcaggccgtatgagcacttttaaaccactaaaaacactcactagccgccgccaggtgctgaaagccggtttggctgccctgacgttgagtggaatgagccaagccatcgccaaagacgaacttttaaaaaccagcaacggacacagcaagccgaaagccaaaaaatctggcggcaaacgtgtcgttgttctcgatccaggtcacggcggaattgataccggagcgatcggacgcaacggtagcaaagaaaaacatgtggtgctggcgattgctaaaaacgtccgttccattttgcgtaatcatgggattgatgcgcgtttaacgcgttctggcgatacgtttatcccactttacgatcgcgttgaaatcgcccataaacatggcgcagatctgtttatgagtattcatgccgatggctttaccaacccgaaagctgccggtgctagcgtatttgccctctctaaccgtggggcaagtagcgcaatggcgaaatacctgtctgaacgcgaaaaccgcgccgatgaagttgccggtaaaaaggcgactgacaaggatcacctattgcaacaagtgctgtttgatctggtgcaaacagataccattaaaaatagtctgacgctcggcagccatattctgaagaagattaagccggtgcataaactgcacagccgcaacaccgaacaagcggcatttgtggtgttgaaaagtccgagcgttcctagcgtgctggtggaaaccagctttatcaccaacccggaagaagaacggctgttaggcacggcggcgtttcgtcagaaaatcgccacagcgattgctgaaggcgtgatcagttatttccactggttcgacaaccagaaagcacatagcaaaaagcgataagttatgaaacccgacgcacaccaggttaaacagtttctgctcaaccttcaggatacgatttgtcagcagctgaccgccgtcgatggcgcagaatttgtcgaagatagttggcagcgcgaagctggcggcggcgggcgtagtcgggtgttgcgtaatggtggtgttttcgaacaggcaggcgtcaactttagccatgtccacggtgaggcgatgcctgcttccgccaccgctcatcgcccggaacttgccgggcgcagtttcgaggcgatgggcgttagtctggtagtgcatccgcataacccgtatgttcccaccagccacgcgaatgtgcggttttttattgccgaaaaaccgggtgccgatcccgtctggtggtttggcggtggcttcgacttaaccccattctatggttttgaagaagatgctattcactggcatcgcaccgcccgtgacctgtgcctgccatttggcgaagacgtttatccccgttacaaaaagtggtgcgacgaatacttctacctcaaacatcgcaacgaacagcgcggtattggcgggctgttctttgatgacctgaacacgccagatttcgaccgctgttttgcctttatgcaggcggtaggcaaaggctacaccgacgcttatttaccaattgtcgagcgacggaaagcgatggcctacggcgagcgcgagcgcaatttccagttatatcgtcgcggtcgttatgtcgagttcaatctggtctgggatcgcggcacgctgtttggcctgcaaactggcgggcgcaccgagtctatcctgatgagtatgccgccactggtacgctgggaatatgattatcagccaaaagatggcagcccagaagcggcgttaagtgagtttattaaggtcagggattgggtgtaactccctcacccccactcccgcatccgctgatgcagcgtcagactcggcttctcggaaaacagctgctggtaatccgtggcaaattgccccagatgccagaatccccactgcatggcggcgtcttttaccgtcatactttggctccacggacttatcagttcgcggcgtacggcgttcaggcgaatgcgtttcagccacgcgttcgggccaatgcctaaaatagcgtgaaacgcgttttgtagcgtgcggcggctgacatgcagttgattacacaaatccagcaccgtcaccggttcggacatgttttccagcacatattcacgggcgcgggaaagcaatcgacggtaactctgatgactgatgctttccgccgtcaccattggttgcgcttcttccagcatggcccccatcgccattagcaaattatcccccagcacttttcgcactgcaggctgatggagattttccggattctcgcaaaacgtcgccagcgcctgttggacaaagccccacagcgcggctttatgctgctctttcacttccagcgcgctctggttacgcaacatatgtaatacccgatccgggttatgcaaaaagttagcctgccgggtgatgacatcttcagaaagcaccacgcccaggatcgtgtaatcatccggcgtgctcagttcaaattcagtgccaccagggcgggtggcgatttccgcgcttcccagacattggctaccgataaatccctgctcaccgcgcgtcgccggaatgccaaaccagaagctgttcggccagaccaggcagctctgacgcagcgccagaccggtgtattcacgaaaaacctgaatatcatcgagtagaatttccgtaaattcaccatgaaacttgcccggatgcagctgatcgtaaatctgctgccaggcggtaatcgttaaagcatgttcatagacatccgttgtctgtcgttgatgaacattatccacttcgaccttcggcgtgagcttcaggttttcgggtaagggttcatgataaagatggtgcaaattggctgtacgggtctttttcatgatgttaatgccgggtgttgtaggacacccggcacctccgacaggttaatggggcttgagacgataacgactactgcgtttacgtaacgtcccggcagaaaagagctgttcgagcgcatttctggctttttccagcggccagccaaagtgggcagccacttctcctgccgtcattccctgacgtacacttgttaacagcgccaacaactcgtcagcagattccgcgacgataactggcgcgtcgggttcccttacgggttgcttcggctggcggttaaagccagtaaccagccactgggtgtcatcgtctggccgaccgatctccttgcggctgatgacacgcccggtacgcatcgcggcagcacaacctgcgtccagcgccgcacgacacgccgccagatcgccttccaccaccagcgttaagcgaccagggtcaagcacttcgtgactgagcagacgaacgttagctgctttgagcatggcatccgctgcatctatcgcggcgaccatgccgtccacttccagcaatcccagtgcattgatcatcggcaacctccgttacgcacgctggattggattacgcgcgatttccagcactgcatcggtaaaggcgttacaggctgctttacacgctgcctggctaccggttaaaaatgctgcgctgtagttggtttcagacggtggcgggacataggtcgccagctgtacgtcggcagacttcagggctgcatcaatgccataggtcgcttccagcggcggtgccaccagatacgccatcggatcgccaagcgtgatcccggcggtactactgagataagaaccggtacggctaactacatgtgccaggaatgccgtatcttgcgcgtcattagcccactggaaagctgcgccattttcaatatgcgcaatcatcgcatccagacctgcacgcacttccgccgggtttggcccaccaagcataatcagcacttcaccggcagtcggactcgggccgtgtgcagcgcccgcatataggctgcggccatacaccacttccaccatcgcctgcttggtcgcttcatcagcggcaatgtaggtgacgtcatcggagtcggcagaaatcagaccgaggctacgaatatgcggcggcaatttcagttcacgcgcaaaatcggcgttaacggaggcaatcacccgcatagcggtgacagacggtcgaatcaaatctaaagctggcatgatgcctccttatcgggtcatgttgatgccggatgctttctgctccagcatacgtttcgccaaatccacaatgacggctgcggcttcaaccggcggcgtgccgccctggtgaatgttagagatacaggtgcgatcggcctcaacggtggtcgccatacgcgggctgtaaacggcgtagcaggagaggctttcactctgacccaaccccggacgttcgcccaccagcaggatcactactttcgcgccgaggatctcaccgatctgatcttcaatcttcacgcgaccataacgaacaaagaatggtgtaccgactttcagcccggcctgtttcaggcccgccatcagcggtggcaggatctcttcgtagttcacggtgatcgcatcagtactcaggccatcagaaataacgacctgtacgtccggattggcaacacactgcgctttcagcgcttcaacagcttctgcacacaggcggcggcccatatccgggcgagtcaggtagagatttttgtcgctaatttcagagcgtacttccagcaagccctgcgctttcacccactcttccggcacttctttcagtacggtatctttgctacgagagtgatcggccaggaaacgcagcagcgcctgcgtacgtggacgcggaccggcacgaccggtacaaacgcgggccacggtgctgcggcgcagttctgttaatacgtctgcgcgatgcggattttcaacaccaatccacgcttttgcttcagcggaacctaaatccagcgcacagctttcgctggtcaccggtgccgcacagttggtggtggcgcactttgcttcactcggcgcgggggccgcttgtcccatactcgccatcacgctgcgtacaatttcttcaatctgtttttgatccatgatatgttatctccgcgtcatcagaagaacagactcggatcgcccgcccgtttggtcaggcgaccgtttgccataatgcccatgctttccagccagcgttcaaactccggactcgggcgcaggttgagtaactgacgcacagtggcggtatcgtggaatgcggtggtctggtagttgagcatgatgtcatcacccagcggcatccccatgatgtagttgcagcctgcggtggcgagcaggatcatcaggttttcgttgaggttctggtcagcgtcagcgtggttggtataacagcagtcacagcccatagagatgccgctcagcttgcccataaagtgatcttctaagccagcacggataatctggcggtcgttgtagagatactccggcccaataaagccgaccacggtgttgacgataaacggatcgtaatgacgcgccagcccgtagttacgtgcttccatcgttacctggtctgcgccgaagttagcgccagcggatagcgcagagccttgtccggtttcgaagtagaggcagttttccccggcgatacggttgaactccgcgcccactgcgcgcgcttcgtcgagcatcgccagctccacgccaaactctttcagccctttttcgctgccacagatactctggaaaatcagcccgcccggtgcgccacgacggatcgcttcgatctgggtggtgacgtgcgccagtacacagccctgagttgggatgttgaatttgtcgatcacgccatagatggtatccaacacgcggcttaagttttccacgtcgtcagtcaccgggttaacgccgatcaccgcatcgcccaccccgaaggaaagcccttcgtagatttgcgcggcgatactttgcacgtcgtcacgggtgtcatttggctgcaaacgggcgctaaaggtgcccggaataccgatggtggtattggcctttttgattaccggcattttcttcgcgccgtagatcaggtccgcgttggagcaaatcttcgctaccgccgcgaccacttcgctggtcagccctttgcgggtaaaggcaatgtcgtccacgctggtttcatcgctcagcacatactcacgcagttcgctgatgctccagtttttaatctggttgtaggccgtttcgttaacatcgtcctgaatcagccgcgtcacgcagtcatcttcataggcaatcaccggattattgcggatgtccgctacggtcatttcgctcaacacctgctttgccgccacgcgctcctgactgcttgccgctgcgacgcccgccagcacatccccgctacgcagttcgttggctttagccagcacctcttttacatccttaaactgatatacattgccgaacaatgtggtctttagtttcataagtcgttccctcaggaaggaaatgcgagacttttcaccgtcaccggcacaacgcttccgccaaaaagaggcgtaccaatgtcgatatagtcccccgcgcggacaatcacttcgtcaatgactgccaacgggagttgttgtagctgtgggcgcaacaacatgcccagagctttaccaaagtcctgcccggccaccaccagcaggggatgcggattcggaaaacgcgcgacgaaatcgaccaacgcgttgatgaccgtcagtaccgcggcgtaacgcacaggcaggctggcgggaagcgccagcacgtacgcgtcagttttgggatcaagatccagctgaatcagcgcctgttgccaggcccccaccagatccgtttcatcaatcgggatcgccaccggcaaattgcgcagcggcagttgtacgccctcaagccagattgtgctgccagagaggctaagggtatgcgcgcccgcgccaatcaccgtggcgcgcacggtttgcgccggaaactgtacgttcatctcacgcaggcgcggatggtcatgcagcgcagttgccagcagcgggccaatatcggcaaaacagaacgggtcggcgggctggtggcgataacattcgcccacgccgccagaaagcgtaatgatttcgggcgtaacacctgcgggcagcaaaccggtttgcatcaatgcctgcgcgagcggactgagcgttccgtcaatcacttcgacaatcagttctgccatccgccgggtcacctgcaccagctgcgcgccggtcaggctacgggcgtcggtgcctgcaccgaagcactcatccacaatcatctgccccggtttatgagcgtaaaccacgcgcccgtggctgtcggtttccagcaggcgaccaccgacgttgaggcaggcagtgccgctgatttttccggcatcgaacagggcgtagttcgcggtgccaccgccgatgtcgatattcagtacccgacacagccgttgttcagaaagggtttgtgccccggctccgtgaccggcgatcacggattcgaggtgcggcccggcgctggcaacgacaaaatcgcccaggctctgagagagcgccatcaccgccgggcgagcattgcgggttttcgcgctttcaccggtgatgatgatggcaccagaatcaacgctttccggctcaatacccgcagcatgatattgctcgagtattaaggttttcagttccgcttcttttaaaccgccctgtttatcgacaggggtaaagaacaccggactttgccagctaatttcgcgtttaatgaattcgtagcgcggcacctggctcaccgccgcacggttaaccagctccagccgggagaaaatcacctgggtggtggtggtgccgatatcgataccgacgctcaatagctggcgagtgttcacgattgtgcctccgcttcggtttaagtcagctttgtgcctccgcttcggttttagtcgcggtcgcgtcttcttttggcaccagcatcatcgccacgccaatcgccgttacgccgccgatcaacttgccgacaatcatcgggaagatcatggcgttcatgttggcagcggcgaagcctaagtggtcgcccagggcgaaagcagcggaaacggcgaaggcgcagttgatgactttgccgcgggtatccatctgcttcatcatgccgaacatcgggatgttgttggcaagcgttgccaccatgccggctgccgcgatgttgttcatattcagtactttaccgacgctcatcagcggtttttcaaaccagcgagtcagcagcagcaccatcggatacgcccctaacagaacgcaggagatagaaccgataacttcaatggcgcgcatcacctcaccgggtttatcgccaggggccataaagataggatccagaccggggatcagttcccagccaagcaggaatttcactaccgcagcggcaagaccgagggtgatcaatgcaacgaggaatttggcgaagatctggaagccgttgatcattttttccgggatgaatttcagccccagcgccaccagaatcgcaacaatgatcaccgggatcatgttcatcaggatcagggcgaaagtgaattccaccggctggccgttgatctgcacaccggagtacatagcaaccagaccaccagcgatacaaccaatcggaatggtcacaatgcccgccagcacgccgagcgccagataacgacggtcagaaggttcgataatgccgagcgccaccggaatggaaaacacaatcgttggccccatcatgctcccgagaattaacccagagtatagccacgcggctacgtcgccgcccgccagctctttggcgaggaagaagccgcccatatcgcacgccagcagtgttccggcgaacatgcttgggttagcgccgagcatttcgtaaaccggaataattaccggcccgagaacgtgagccagtaccggtgccagcgcggtcataccgaccatcgccaggcccagtgcgcccattgccataaagccttcttcgaactgaccgccacttccttcgatacttttaccgaacttaccgaggaaacgagcagaaccgccgaactggctcaggatcctgtctacggcagctatcagcataaagaacatcatgatgtacatgatgatttcgttaattcccatcgcctttactccctgttagttgttatttattggcggatgcggcgtaaacgccttatccgccctacatgtgcaatcccgtaggctggataagacgcggcaagcgtcgcatccggcaattgcaccgcgccactggcggatgcggcgtgaacgccttatccgccctacatgtgcaatcccgtaggctggataagatgcggcaagcgtcgcatccggcatttattgcgccgctgcgtacaggccgacaatctgctccaggctggcggtacgcgggttactgcgcagacaaatatcttccagcgcggcctgcgcccatgcgccgtaatgcgcagatgtcgcaccaacatcgcccagtcgtttaccaatcccaacttccgcaatcagctcacttaccgcgttaatagcgtcacgatcgtcggattttttagttcgcagtgcccgaccaatctgactaaagcgttcacgacaaaccatccggttaaattccatcaccgttggcagcaacatggcgttcgcgagaccgtgcggaatatgcagcgccgcgcccggctgatgcgccatcgcgtggcacaacccaagacccgcactggaaaacgccattcccgccatacaactagccagcaacatgctctcgcgcgcggcaaggtcgtgaccgtagcccaccgctttcggcaggcttttgccaatcatcgcaatggcaccaatcgccagactgtcggtaaacggtgtagcgttcagggcgctgtatgcttcaatggcatgggttaacgcatcaatgccggtcatcgccgtgacatggctcggcacaccttcggtcaatgcggcgtcgaggatcgccacatccggcatcaggctggcatgggctaacacctgcttgcgcccgctcaccgcgtcgataatcaccgttacattggtggtttcagagccggttccggcggtagttggaatggcaatcagcggcaagcgcggttgcagaacgctggtttcactcatctctgccagcgtgctatccgggttcgtcaccagcaacgtcacggctttcgccgcatccagcacgctgccgccgccaaacgcgatcaccccatcacagccactctcacgcaactgcgccacggctgcacacacgtcggtaatgcacggttcgcccaccggacatggccagagcgtcatggcgatacctttaacggtcaggctacgcgtcagcccggcggtcatccctgcctgatgcaaaaagctgtctgccatcacgaacagatgtttcagcccacgcgtttgcgcttgctgtccgcaactgctcacgctgcccggaccgcaaagcgtcaccggtggaacgctaaatgtttttacccgttgcagattcagggtatcgaacgcctgaaagagcgcggtctgcaattcattttgcatatagcccctccgctttctctcgcccactactggcgatcgccagcggggtcataaacaaactgtgctgcggtaaatgcacctgtaacgccgggaattgtttgcgaaacagttccgccacgcccggttgcatacaagagccgcccgccagccataaatcagtaatgccctgcccttcaatatgccgggcgacaatgtccgccattttttcgtacaccggtttcaccgcaggccaaatctcttcaccgtgaccgcgcttgtactgctccgcctcttccaggctaatacggcgatttccggcgagagtcagagagatgtgatgtccgccggtggcttcatccgcgctgtacgtcaccttgccctttttcacgatggcaatgccggtagtgccgccgccgatatccactacaccggcgttgtccagttgcagcagatccgcaactgcggttggctcatccagcacatggctcacttccagtccggcagattccagcacgttgatggaaatacgcgggtccgtacctggaggaaaactagtcgccgcatggctaaaacgacgaccgaattgctgctcgagcgtgtcgagatggcgacgaacaatggtgacagcgccgaagaaatcccagacgatgccgtcgcgaaccacatcggcccagtcgaggcataccgccactggctgaccgtcgcggtcgacaaccatgctcaccacatcgcaggtgcccagatccacccccagccacagcggagattccgtcgcggcgggcgtctggttacacagcgttgccgccgtttgcagacgtggggtgagccattgttcgtcgtgcgccatctgttactccttaaacaatgcgaaacgcatcgactaatacacagcgacgcagacggacaaacgtacgcgcgctggttaccccttcaccggttggcgtggtgatggtcatggtggtccagccttccccgcccagccccagcccggcaatgcacggtccgttcttaacgaaaatgctggtatcaatagcattcgccatctggttcatgttttcgatgttgcggctgtgcattgccgccgtgtggtggcaaccgccttccagtttcaccgctagcgcaatggcatccgccacgttggcgacgcgcacgacgggcaacaccggcatcatcagttcagtcacggcaaacggatgttctgcggtggtttccacaaacagcaggcgcgtttcttgcggaactttaaggccgattgccgccgcgattttgcctgcgtcgcgaccaacccagtcacggctgacggtgccttttccgcgctcgtcgatatttttcagcaacaccggttgcagctgctgcgcctgttctgcggtcagtttcaccgcgtgctggccttccatcagacgcatcagttcatcggctacgctatcaacaacaatcagtaccttttcgtcggcacaaatgatgttgttatcgaaagaagcgcctttgacgatggactgagcggcacgggcgaggtcggcggtttcatccaccactaccggcgggttgccagcgcctgcggcaatcagacgtttattggtgtgtttacgcgccgcttctactaccgcttcgccgccggttaccaccagcaggccgatacccggaaacttgaacaagcgttgcgcggtttcgatatccggatttgccacagtaaccagtaagttttccggcccacctgcggcaacaatcgcctggttgagcagcgtaatcgcccgctgggagacttttttcgccgccggatgcggggcaaaaatgacgctgttgcccgcggcaatcaggctgatggcgttgttaattacggttgccgccgggttagtggaaggcgtcacgctagccaccacgccccagggtgcgttttcaattagggtcaggccgttgtcgccagtcagcacttgcggagagaggcactcaacgcctggtgtgccgcgcgcctgagcgacgttttttgcaaatttatcttcaacgcgccccatgccggtttcactgacggcaagttccgctaaatctctggcgtgtttttcgcctgcttcacgaatggcagcaatggctaactggcgcattgccacgctttttaacccttgctgggcgactttggctgccgcaacggcgtcatccagggacgcgaaaacgcccatctcatgaacggcggcggacggcgtgtcactgctttgcattttcagcagtaccgctttcaccacctgttcaatatcctgttgattcatgatgttctgccttatttgtggaaaattacctgaccgccagacaccacctcatcgacaatgccaatcacgcacagatcgaccggactcgtttcgcttttatgcgcctggcgggcggaactgccactcaccagtaacacccactccccggttcccgcgccaatattgtcgatggcgacggcgcattgcccgtcaggattaccttgtggatcaatcatttccaccatcagcaatttgtcatgcgccagtccgtgatggcgtacggtacaaacaatttgtccagtgacgactgccagtttcatacccgcctccgtggcgtatttcaggtaaaagctccccctaccctccgcagaaggtaaaatgaaaaaggagagagcgtgacgcccgaatcgacgtcacacagggtgattacaggttgctgctatcgcctttcaggccgatcgggaagacttcttccaggtcgccgtgcggacgcgggataacgtgtacagataccagctcgccgatacgctgtgccgctgcggcacctgcatcggtcgcggctttacaggctgcaacatcaccacgaaccatggcagtacacaggccgccgccaatctgcttaacaccaaccagcttgacgcgcgcagctttcaccatcgcgtcagaagcctcaatcagtgcaaccaggccccgggtttcgatcattcctaatgcttccattgtgctttcctctttatcagggtccagaacgggaccgttcattcaaccagtgtttgtaaactgctttcgcggttcacttctgtctgacgcggcacagctgccaccagcgccagctcgataatttcctgcacgctacaaccacgagagagatcgtgcatcggcgcggcaagtccttgtatcagtggcccgacggcacgatatccgccgagtcgttgtgcgattttgtaaccaatatttccggcttccaggctcggaaaaaccatcacattggccttgccctgtagcgggctggcaggcgctttttgcgccgccacttccggcacgaaggcggcgtcaaactgtaactcgccatccaccaccagctttggtgcgcgctcacggacgatttctgtcgcctgctggacgttagcaacacaggggtgacgggcgctaccattgctggaaaagctcagcatcgccacgcgcggctcttctccggtgatggcgcgccaggtttcggcactggcaagcgcgatatccgccagctgcgccgccgtcggctgtggcaccacgctgcaatcggcaaagcccaacgccgggccgctgtactgtggcaacatcaggaaaatggaagagagcgttttacagcctggctgcaagccgataatgcgtaatccggcacgcagcacatttgccgtggaagagaggttgcccgcgatacagacatccgctttaccggcgctgaccattgctgcggcgaacatcagagggtcggtaagtttttccagcgcatccggcggcgttttttcgcccgcgcgggccagccagcgatgagcaaattcttcccgcattgcgaggttgccatgcggatcaatcacctgtagcccgtccatcgccacgccgtgactgagcgcaaactgacgaagttcaaacggattggcgaccagaatgggcgttgccagaccttgttgatgtaaatattgcgcggctttcagcacacgttggtctaacgcatccggaaaaaccactctggcgggcgctcgcaacgccagttcacgacaacgttcaataatcattgcgtttcccccagtcgttgttggatctgcttcaccgttagcggctgcttcgttacgctcaggatcatcatcacgtagaccgtgctgctaaggcggttcagcgcctgcaaaatgtccgggcgtaatacttcaaagctgcgggtgataaagacctgcgccgctacggtttcggtttcccgcactttggtgcgtagcagattgagcaacgcagcatcgcgcccgtggctggcttccggcaccagatgatcgtggtcgagatagcgcagcggctgatgagaaagccgatgcagatcttcgtcagaaagcccgacaatcgcctggcagcccagcggttcccccagcgcatcggcgcgcataatgttgccaagacggctacggatatccgccagccacggctgccacggttccgccagttcaatttgcagccacactgccagcgcaatggtgctgtcgagaaccgcgcgaaaacccagacgcggatcgcttttggcgaccattttttccgcgctcaggtgagtcagcgtatccggcttttttgccaccggctggcgacacagttcgcagcacgcctgcggatgttcatcgctactggtcagcccatgaacgggctgcggctgctgctgttcatcgtcaacaaacaggcggccctgctcgtcaataaacttgatgcgcagatggcggctttccagcaactcccgggcagagggcgtcaggcgactgtccgcagggagatggatctctgcgccttcgctgagcgtatggttcgctcttagccatgcttcggtgatgaaatctttcatagggattgccagttagccggccaggcgacatacaggaatttcacgctggatgtcgtaccaaattcgatgctggagcctttcgggataaacatcacgtcgcctgctttggcgatcatggtttggccttcgtggcgaacatgcagctccccttccagcaccatgtcgatttcgtcgtagttcagggtccacgggaagaatgcgttctcccactgcataaaaccggcggccatgctgctgccgtcgtctccggtcacaagatcagtcaagcccacgcaatgcggctctgcgccgtcgaaacgaccaaacttgacgctactgccatcaatcactttgatgccgcctttgccggtcacgcttttgaagctcggctgcattgcgccctgctccaggctctgtttttccttcatcactttttccatcagctgtgcgaccaggctttcggtaaactggccttccggcagctgggcaatgatggtttcgcggatgcgctggctttcggttttgtcggctggcacgctggcgggcacggacgccgttaccgggatgctttcatcacattcggtgatggtaaaacccagtagatccgccacttcacgggcttccggggtaataatgctggcgcgcagaaccacggacattgcctgttcgccgcgcgcgtgtgcttcacgaatatcattcgctgtgatgagttttttcacctgcttcctcctgtttggtgagagatgccagataatccaccagttgctgcacgctttgcgggtcgtggctgtttagctcgaacatcggctcttcgaaacccgtctcaagcaataactttcgcgttgcggcgacgtcagcatctggcatgtccgttttactgatgacggcgatttgccgtttgctgacgccaatatccagcaacccggcaggcaaccgactttccgggtcatttgcgccatggacatagatcagcatgtctacatcctgtagcgtggtaattaaggcgtgataccagcggggatggttaaaatattcacccggcgtatcaatatcgcccttatcattaaattccacggcctgtgtttttctggcgagggtataattcccctgcaacgcattaaataacgttgtttttcctgccccgacgctacccacaaacgcaattcgtttcatgaatgcctcgtattaacttttggtcatttcacaaagcgtataatttaataagcgacctaaaccgctgacggtttgacttaacgcttcttctactgcgcccacgctgccataaatcaccaatgcaccgctgaatcggtcgagaaaaccgatatgcacatcagcggctttcagcgctaaatcaccggcgatcatcgccgtttcgccgggagttagcgtcataatgccaattgcgcccgcatccggaacgccgattttcttcgccagttcctcaccgggatgcgcgatgagatgcgccagtgtgacctgtttgccgggcacaaattcctgaatgatgcgttctttatccatgagtcgccgcctgtgaaaaactttcgtgtatcgtgacaatttttcgtcagagtaaataacaaaattcggcaagcgcgtttaaaaggtgaggtagatcactaagaatggagagatattcgctgtggtgcataaactttcatatgcaacgcatgaatataaataaaataatatcgagatattatatagactgcttttttttattattcgcaaactcagtaataagctttactaatatattgcagctaaactgcttaccctgaatattcagggtaagcgtgagagttaaaaaaaattacagcggttgggtttgcgcttctaccacggccagcgccaccatgttgacgatacgacgcacgcttgcgatcggcgttaacacgtgaaccggtttcgccacacccatcagcaccgggccgacagtcacaccttcgctgctggaaacacgcagtaagttgtaactaatgcgggcagcttccatgttcggcatcaccagaatattggcggaacctttcaaagagctgtccggcatacggtcgttgcgaatcgcttccaccagcgctgcatcgccgtgcatttcaccatcaatcatcagttctggtgcacgttccctgaccagttccagcgcctgacgcattttgctgctgctcgggcagtcagaagaaccaaagttggagtggctcaacaaagcaacgcgcggctcaataccaaaacgacggacagtttctgccgccatcaaggtgatctccgccagctcttctgcatccggttcatcattaacatatgtatcggcaataaaggtgttaccactcggcagcagcagcgcgttcatggcacctgcggtgtgaacgccatcgcgataaccaaagacatttttcaccacgctaaaatgttcatgataatcacccaccgtaccgcaaatcattgcatcggcttccccacgctgaaccatgatcgcgccgatcactgtcgggttactgatcagcgcccgctgcgcctgttcctgagtgacgccgcgacgcttcatgatctggaagtattcggtccagtactctttaaagcgcggatcggattcgttattgacgatctcaaaatcaacgcccgctttgatctgcaagcccagtttctgaatgcgcatttcgatcacgttcggacgaccgataaggatcggtttcgccagtcccagcgttaccagttcctgagtggcatgcagaacgcgcgcctcttccccttccggcagaacaacgcgcttcggcgctttgcgagcctgggagaaaatcggcttcataaacaggttggttttgtaaacgaactcagtcagcttgtcgatgtagacgtcgaaatcagcaatcggacgagtcgccacgccgctctccatcgcggctttagcgaccgcaggagcgatcttaacgatcaagcgcggatcaaacggctttggaatgatgtattccggaccaaagctcagatcctgatcgccatacgcactagccaccacttcgctctgttccgcatgggcgagttctgcaatcgcacgtaccgccgccagtttcatctcttcgttgatggcggttgcgccaacgtccagcgcgccacggaagatgaacgggaagcacaggacgttgttcacctggttcggatagtcagaacgaccggtgcaaatgatggcatccggacgcacttctttcgccagcggcggcagaatttccggttccgggttcgccagcgccaggatcattggcgcacgagccattttcttcaccatttcctgggtcagcactttcgggccggaacagcccaggaaaatatccgcgccttcaatcacatcatcgagggtacgtttgccgtcatccaccaccgcatatgcggctttggtttccgccatgtttggctcacggccctgatagataacgcctttactatcgcaaaccacgatgttatgtttttgcagacccagcgctaccagcaggttcatacaggcgattgctgcggcacccgcgccggaaaccaccatccgcacgtcggagatgtttttctccaccacgcgcaagccgttgaggatggcggcagtgctgataattgccgtgccgtgctgatcgtcgtggaataccggaatattcatccgctcgcgcagtttctgttcaatatagaaacattctggcgctttaatgtcttcgaggttgatgccgccgaaggttggttcgagcgcggcgacaacttcaataaatttgtccgggtcgagttcgtcaacttcaatgtcaaatacatcaatcccggcgaatttcttaaacagaacgcccttgccttccatcaccggtttgcctgccagcgcgccaatgttgcctaaccccagcaccgccgtaccgttagagatcaccgccaccaggttacctcgggcggtatatttgtaggcttttaacgggtctttttcgatttcaagacaaggtgcggcaacgcctggactgtaggccagcgccagatcgcgctgtgttgccagaggcttggttggagaaacctggattttccctggaactggaaattcatggaaatcaagtgcactttgttttaactggtcatccatttggttgttcctttcacgtaacgttcacaaataaagtgtgtgggcaacagcccctgcccacaacgtggcgcacattattaccctgccggagtctacagactttgagcaagtccaaactctcaccattaatataatgttttggtaataatcctataacactgatgttacctgcttaatccagcaataccatgcctgtctgctatgcttttttgatgcgtttagcgaaatttctcagaagtgtgaattaacgcactcatctaacactttacttttcaaggagtatttcctatgaacgagttagacggcatcaaacagttcaccactgtcgtggcagacagcggcgatattgagtccattcgccattatcatccccaggatgccaccaccaatcctagcctgttactcaaagctgccggattaagtcaatatgagcatttaatagacgatgctatcgcctggggtaaaaaaaatggcaagacccaggaacaacaggtggtcgcagcgtgtgacaaactggcggtcaatttcggtgctgaaatcctcaaaatcgtacccggtcgcgtgagtacagaagttgatgcacgcctctcttttgataaagaaaagagtattgagaaggcgcgccatctggtggacttgtatcagcaacaaggcgttgagaaaagtcgcattctgatcaagctggctagcacctgggaaggaattcgcgcggcagaagagctggaaaaagaaggtattaactgcaacctgacgctgctgttttcttttgcacaggcacgggcctgtgcggaagcaggcgtttttctgattagcccgtttgtcgggcgtatttatgactggtatcaggcacgcaagccgatggacccgtatgtggtggaagaagatccgggcgttaaaagcgtgcgcaatatctacgactactataagcaacaccactatgaaaccattgtgatgggcgcgagcttccgtcgcaccgaacaaatcctcgccttaaccggctgcgatcgactgactatcgcaccgaatttactgaaggagctgcaggaaaaagttagcccagtggtacgtaaattaatcccaccttctcagacgttcccacgcccagctcccatgagcgaagcggagttccgttgggagcacaatcaggatgcgatggcggtagaaaaactgtctgaaggcattcgtctgttcgccgttgatcaacgcaaactggaagatcttcttgccgccaaactataaaccagccacggagtgttatatgtcccgaaaagaccttgccaatgcgattcgcgcactcagtatggatgcggtacaaaaagccaactctggtcatcccggcgcgccgatgggcatggctgatattgccgaagtgctgtggaacgattttcttaaacataaccctaccgacccaacctggtatgatcgcgaccgctttattctttccaacggtcacgcgagcatgctgctctacagtttgctacatctgaccggttacgacctgccgctggaagaactgaagaacttccgtcagttgcatagcaaaaccccaggccacccggagattggctatacgccaggcgttgaaaccaccaccggcccgcttggacaaggtttggcgaacgccgtcgggctggcgatagcagagcgtacactggcggcgcagtttaaccagccagaccatgagatcgtcgatcacttcacctatgtgtttatgggcgacggctgcctgatggaaggtatttcccacgaagtctgtagcctggcaggcacgctgggactgggcaagctgattggtttttacgatcacaacggtatttccatcgacggtgaaacagaaggctggtttaccgacgatacggcaaaacgttttgaagcctatcactggcatgtgatccatgaaatcgacggtcacgatccgcaggcggtgaaggaagcgatccttgaagcgcaaagcgtgaaagataagccgagcctgattatctgccgtacggtgattggctttggtagcccgaataaagcaggtaaggaagaggcgcacggcgcaccactgggggaagaagaagtggcgctggcacggcaaaaactgggctggcaccatccgccatttgagatccctaaagagatttatcacgcctgggatgcccgtgaaaaaggcgaaaaagcgcagcagagctggaatgagaagtttgccgcctataaaaaggctcatccgcaactggcagaagagtttacccgacggatgagcggtggtttaccgaaggactgggagaaaacgactcagaaatatatcaatgagttacaggcaaatccggcgaaaatcgctacccgtaaggctagccaaaatacgcttaacgcttacgggccgatgctgcctgagttgctcggcggtagcgcggatctggctcccagcaacctgaccatctggaaaggttctgttagcctgaaggaagatccagcgggcaactacattcactacggggtgcgtgaatttggcatgaccgctatcgccaacggcatcgcgcaccacggcggctttgtgccgtataccgcgacgttcctgatgtttgttgaatacgcccgtaacgccgcgcggatggcggcactgatgaaagcgcggcagattatggtttatacccacgacagtattggcctgggcgaagatggtccgacgcaccaggctgttgagcaactggccagcctgcgcttaacgccaaatttcagcacctggcgaccgtgcgatcaggtggaagcggcggtgggctggaagctggcggttgagcgccacaacggaccgacggcactgatcctcagtaggcagaatctggcccaggtggaacgtacgccggatcaggttaaagagattgctcgtggcggttatgtgctgaaagacagcggcggtaagccagatattattctgattgccaccggtagtgagatggaaattaccctgcaagcggcagagaaattagcaggagaaggtcgcaatgtacgcgtagtttccctgcccagcaccgatattttcgacgcccaggatgaggaatatcgggagagcgtgttgccttctaacgttgcggctcgcgtggcggtggaagcaggtattgccgattactggtacaagtatgttggtctgaaaggggcaattgtcgggatgacgggttacggggaatctgctccggcggataagctgttcccgttctttggctttaccgccgagaatattgtggcaaaagcgcataaggtgctgggagtgaaaggtgcctgatggtgattgccggatgctgattgccggatgcgacgctgacgcgtcttatccggcctacagcgtcttatccggcctacatgtcccgccattttgtttaacgggtgatccacaacgtgggccaggcgtctggcccatgccagttatcgcaggtgggttctgcggcgtaacgcaccaggcgaaaacgctgaccgtcaaagcgccagcgcgcctgaatgccacaatcgcttaatccgcgccctttcgctaaggtcaccagttcacggcttttctcatcaaatgttgcgttcatcagttccagttcattcgtctcctgaccgttgttgaacggcaaacgcaaccgaaccgggcggctagctagtggctttttacggctcacaatccatgccaaatcaatggtgttataggcccctgcctcacagctaatcatcatcagcgctttatcatcagtcagcgcagtgacattcacctcacgacgcaatggatcaaggctgcagcgcagaccattcatccgccagtttccataatccagcaaatcgttgcgttcttcgagactgagtggcgtcggcgttgggttaaccaccgcgacctctttcagcgcaggcgcgggcggtacgctgagcggcggttcgtcccctttcttgatccacgcggtttcactgccaacgcgcttttgctgagcatcaataaacaacaacgctgcttttaagccactcagagaaatggtctgatcgccatcgcgtaaggtgattgccttcccttcctgaatcatctgcaaaaacgcggtgatggttgccgtatcatcggttactaataaccatggactaatccgccacttgtcaccacttaacgccaacggctcgccatctaacagcagccgtggcgctatctccccttcactcgcctccgggctcttcaatccgccgcgctcaatacgtaaaacggcatcggtatgcgccccggcgctgcggctcagggtcatcaccagtccattatgatcgcccgtattacgcgccacgcagaaattttggttattacaggtgacctgccagtcggaaaacgcccgttgcgctggtgccgcccacaccaaagacgtcggcaacaaagcgaaaaaaaagagaaggaaaatgcgatagcgcatggacggtacgaccccagaagttcaaacaaacagcacaagtcgtatcttcgttgcgcaggtagcgcggctcaatcggatttgtcggattgagccaataataaacaacgaaatattattgttatttttcagtccattaaatgactcgtttgcaaatagttaagcaataacaccgtcttaccgtcacgtatctcgccggttttgatcatctccagcgcctggctgaacggcagctcgagcacttcaatatcttcatcttcgacaccgccaccggcgttagcgcgctgattgtcactgtattcggcgataaaaaagtggattagctcagtcacaccgcctgggctcatatacagttcaaataatttgcgcacttcacccacttcatagcccgtctcttcaatcgcttctttgcgaatacacacttccggttcgtcgttatccagcagcccggcgcagctttcaatcagctgcccgctttcattgccattaacccaggtagcgacacggaactgacgaatcagaaccacggtctttttcttcgtgttgtacaggaggatcgtcgcaccattgccgcgatcgtacacttcacgtttatggcggataacttcgccgtctttgcgcgtgagatcgtaagtaatgttgtgcagggtgaaatagttatcggagagaattttgtctttaatgagggtgatttgttgcgtcataccgactccacagcgcgaaatgaacaattatcttacgctgtgaagtcgggtttgtctgcgcaggctatcagtgagatttgacactttttacccccagccagtcaataatcccctgtgccgcatgacgtccttctgccattgcggtaaccaccagatccgcaccacgcacggcgtcaccaccagcgaagattttcggattggtggtctggtaacggtactggctttccacatccgcgatgatgcggccccatttgtctaccgttacaccgtggctctccagccacggcatcccgtgcggattgaagccaaacgccataatcaccgcgtcggctggcatgacaaattcactgccttccaccggcactggacgccgacgcccctgggcatccggctctccaagacgcgtgcgcaggaaacgaatcccgcagacgtgaccttgttcattcagctcaagcgccaccggctggacgttaaattcgaagttggccccctcttcgcgggcgttcttcacttctttcttgctgcctggcatgttagcttcatcacgacgataagcgcaggtgacgttactcgcgccgtggcgcagtgcggtacgcacacagtccatcgcggtgtcgccgccgcccagtaccacgacgttaagtccggcggtattgataaacggctcttccggtagctcttcgagccccatcacctgtttagtgttggcaatgaggaacggcagcgcgtcataaacgcccggcgcatcttcattgggtaaacccgctttcatggaacggtaagtgcctacgccaacgaagaccgcgtcgtattgttccaaaaggctatccaaagagacatctttacccacttcacaattgagttcgaagtgaatccccatcgcgctgaagatttcccgacggcgtgccagcagggatttatccagtttgaaagaaggaatgccgaaagtgagcaagccaccgatttctggatggcgatcgtacaccgtcacccccacgccattgcgggtcagaacatccgcacaggccagccctgccggacctgcaccgataatcgccacccgcttgtccactttggtgacatggcttaagtcaggacgccaacctttcgccaacgcctgatcactaatgtagcgttcaatgttgccgatagttaccgcgccgtgctcatcgcgaatagtacaggcaccttcacacaaacggtcttgcggacaaacgcgtccggtaatttccggcagggtgttggtctggtgagaaagctcgacggcggcgtcgatgtttccggctttcaccagttcaatccactgcggtatatggttatgcagcgggcaggtccattcacaaacgctgtgctcgccgcacttaaggcagcggctggcttcccgttgtgcctggtcggcgcgaaatggcagataaatttcatcaaaaccggttttgcgcgcttcaatcgccagtttatccggctcgccacgcgcgggcgttgcctgcatttgttcgactttactcattaccggcatttcttgcgccgcggtactggcatgccacggttgatgttcctgacgcgcggtgcgcaagcggcgggatttcgccatgccggagagtgcgacgtcagtgaccagttgcagcgcgtccgccgggcaattctcaacacaggcaggaccgttttcgcgccccgcacaaaggtcgcatttatgcgccgtggcttttacttttcctgccgcgacgggtgtcaggacgatttgcatcgtaccaaaaggacaggccaccacgcaggatttacagccaatacacttttgctgattgacctgaatgctgtcatcaacgtggctgattgcgccattagggcagctacgggcgcagggcgcatcttcacaatggtgacaggtcactgcactacgttgctgttgatgtttgataaccgtaattcggggatgaaaatggtgttggctcaggacatgttgctcatcattgtgagccatgacacaggcgatttcacaagcatgacaacccagacattgctgactgttggccataataaaacgattcataacgaccttcttttttggttgtaaaaaccttattctttatatgagtgttgttattacccgacttacaggggaatcggcaatgttcatgtgcccagaataagtaactatttcgctataaactgtggcagatcaaataatcccatcactgactaaattgcgtttcagcgaactggaacattaatgattttttgtggagaagacgcgtgtgattgttaaacgacccgtcagcgccagtctggcccgggcctttttttacattgtgctgctgagcattctttccacgggtatcgctctgctaactctggcgagcagtttgcgcgacgctgaggctatcaatattgccggaagcctgcgtatgcagagttaccgcctgggctacgacttgcaaagtggcagtccacaactcaatgcacatcgccagttatttcagcaggcactgcatagtccggtattaaccaacctcaacgtctggtatgtgccagaagcagtaaaaactcgctatgcgcatctgaatgccaactggctggagatgaataatcggctcagcaagggcgatttgccgtggtatcaggccaatattaataattatgttaatcagatagacctgttcgtactggctttacagcactacgctgaacgcaaaatgctgctggtggtggcgatttccctggctggcggcatcggtattttcacgctggtcttttttactttgcgccgcatacgccatcaggtggttgccccgctgaatcagctggttaccgccagtcagcgtattgaacacgggcagttcgacagcccgccgctggataccaacctgccgaatgagcttggtctgcttgcaaaaacctttaaccagatgagcagcgagctgcataaattgtaccgtagcctggaagcgagtgtagaagaaaagacccgcgatctccacgaggccaagcgtcgtctggaggtgttgtatcagtgtagccaggcgctgaacactagccagattgatgtgcattgtttccgccatattttgcagattgttcgcgacaatgaagcggctgaatatctggagttaaatgtcggtgaaaactggcggattagcgaagggcaaccaaacccggaattgccgatgcagattttaccggtgacaatgcaagagacggtttacggcgaactgcactggcaaaatagtcacgttagtagtagtgaaccgctgcttaacagcgttagcagcatgctgggacgcggtttgtactttaatcaggcgcagaagcattttcagcaattattgttgatggaagaacgtgcgaccatcgcccgcgaattgcacgacagcctggctcaggtactttcttacttacgtatccagttgacgttactgaagcgtagcataccggaagataacgccaccgcacaaagtatcatggccgatttttcccaggcgttgaatgatgcttatcggcagttacgcgagctgttgactactttccgcctgacgctgcagcaggcggatctcccctccgcattgagggaaatgctggatacgttacaaaatcaaaccagcgccaaactgaccctcgactgccgtctgccaaccctggcactggatgcgcaaatgcaggtgcatttgttgcaaattattcgcgaagcggtgctgaatgcgatgaagcacgccaacgccagcgaaatcgccgtcagttgcgtcaccgcgccggacggcaatcacacggtttatatccgtgataacgggattggtatcggtgaaccgaaagaacccgaaggtcattatggtctgaatatcatgcgcgaacgcgcggaacggctaggtgggacgctgacttttagtcaaccttccggcggcggcacgttagtgagtattagctttcgctctgcggagggtgaggaaagtcagttaatgtaatgcctcctactgaccaaagaatacttgcacttaaggttcagtataaaagggcatgataatttacattaactcctttttttctccacgattggctcgtaccttgccgctacagtgaagcaagtcaagcctacaacgatacgcagaaacacgaggtcctcttttaatggcgaatttctttattgatcgccccatttttgcctgggtgctggcaatcctgttgtgtctgacaggtaccctggcgatttttagtttgcccgttgaacaataccccgatctcgcgccaccgaatgtgcgagtgaccgctaactatcccggcgcaagcgcccagacgctggaaaacaccgtgacccaggttatcgagcaaaatatgaccggcctcgataatctcatgtatatgagttctcagagcagtggcaccggtcaggcatctgtcactttaagttttaaagcaggcaccgatccggacgaagccgtgcagcaagtacaaaaccagctgcaaagtgccatgcgaaagttaccgcaggcggtgcaaaatcagggcgtgacggtgcgtaaaaccggcgataccaacattctgaccattgccttcgtctctaccgatggtagcatggataaacaggatattgctgattatgttgccagtaatattcaggacccgttaagccgcgtgaatggcgtcggggatatcgatgcctatggtagccaatattccatgcgtatctggctggacccggcgaaactcaacagtttccagatgacggctaaagatgtcactgatgccattgagagtcagaacgcgcagattgcggttgggcaacttggtggtacaccttccgtcgataagcaggcgctcaacgccaccattaacgcccagagtctgctgcaaacaccagaacagttccgcgatatcaccttgcgggtcaatcaggacggcagtgaggtaaggctgggcgatgtcgccaccgtcgaaatgggggcggagaaatacgattatcttagccgcttcaatggtaagccagcctccgggctgggggtaaaactggcctccggcgctaacgaaatggcgacagcggagctggtgctcaatcgtctcgacgagctggcgcagtatttcccgcatggactggaatacaaggtggcgtatgaaaccaccagctttgttaaagcctccattgaagacgtggtgaaaacgctgctggaagctatcgctctggttttcctcgttatgtatctgttcctgcaaaacttccgcgccacgctgatacccactatcgccgtgccggtggtgttgatgggaaccttctccgtactttacgccttcggttacagcgtcaacaccttaaccatgttcgcgatggtgctggcgatcggtctgctggtggatgacgccatcgtggtggtggaaaacgtcgaacgtattatgagtgaggaaggactcactcctcgcgaagccacacgtaaaagcatggggcagatccagggggcactggtcgggattgcgatggttcttagcgcggtatttgtaccaatggccttcttcggcggcaccaccggtgccatctatcgccagttctctattaccattgttgcggcgatggtgctgagtgtactggtagcgatgatcctcactccggctctgtgtgccacactacttaagccactgaaaaaaggtgagcatcatgggcaaaaaggcttttttgcctggtttaaccagatgtttaaccgcaacgccgaacgctacgaaaaaggggtggcgaaaattctccaccgtagcctgcgctggattgtgatttatgtcctgctgcttggcggcatggtgttcctgttcctgcgtttgccgacgagcttcttaccgctggaagaccgtggcatgtttactaccagcgtacagttgcccagcggtagtacgcaacaacagaccctgaaagtcgttgagcaaatcgagaaatactacttcacccatgaaaaagacaacatcatgagcgtgtttgccaccgttggttctggccctgggggtaacgggcaaaacgtggcgcgaatgtttatccgcctgaaagactggagcgaacgcgacagtaagaccggcaccagctttgccattatcgagcgtgcaacgaaggcgtttaaccaaattaaagaagctcgcgttatcgccagcagcccgccagcaattagcggtcttggtagttctgcaggttttgatatggagttgcaggaccacgctggagcgggtcacgatgcgctgatggcagcacgtaatcagttgctggcgctggcggcggaaaacccggagctaacccgtgtgcgccataacggcctcgacgacagtccgcagttgcagattgatatcgaccagcgtaaagctcaggcgctgggcgttgctatcgacgatattaacgacacactgcaaaccgcctggggtagcagctatgtgaatgactttatggatcgcggtcgcgtgaagaaagtctatgtgcaggcagctgcgccgtatcgcatgctgccagatgacatcaatctctggtatgtccgaaataaagatggcggcatggtgcccttctctgctttcgcgaccagtcgctgggaaacaggcagcccgcgtctggaacgctataacggttattctgcggttgagattgttggggaagccgcaccgggggtcagtaccggtacggcgatggatattatggaaagcttagtgaagcagctgccaaacggctttggtctggagtggacggcgatgagctatcaggagcggctttccggcgcgcaggctccggcgctgtacgccatttccttgctggtggtattcctgtgtctggctgcgttgtatgaaagctggagcgtgccgttcagcgtaatgctggtcgtgccgctgggggtaatcggcgcgctgctggcaacctggatgcgcgggctggaaaacgacgtttacttccaggtgggcctgttaacggtcattggtttaagcgcgaaaaacgccatcctgatcgtcgagtttgctaacgagatgaaccaaaaaggccacgacctgtttgaagcgacgctccacgcctgccgtcagcgtttacgcccgattctgatgaccagcctggcatttatcttcggcgtattgccaatggcaaccagcacgggtgccggttccggtggtcagcatgcggtgggtactggcgtaatgggcgggatgattagcgccactattctggctatttacttcgtgccgctgttctttgtgctggtgcgccgccgcttcccgctgaagccgcgcccggaataagcaataaaaaaggcgacatgccaatgtgtcgcctttttcaactttccgattaagaacctgctcagcgggttcttgctgtttgtactttgtctcaggaattacttacgaagcataacttcgataaagtctttccagttccccagttcacgttcaatcataacaacctctcttataattatgggtattctacggaaacaatataccgtggtgaagctaatttactcgattgctgcgatgactacctccgggggacaaatcttatgtaaatactatggtcctgcggtgatgatttgtatgtgatacacagcaacatttcgagatattcatacggcatctaatactgatttaattctggttaaaatacagacagataacaagatgaatattcttaatgtttacgttaaaaatgtttaatattatttaatagttgttaatttgaatacttcgataatgttatatttcctgataatcatttgcaggcaaaatgttttcacccttaaatgagtatttattctcataaatcgaaaaaggattcattatggttacactttacggtatcaaaaattgtgacaccattaaaaaggctcgccgttggctggaagccaataacatcgactatcgttttcatgattaccgcgtcgatgggctggacagcgaattattgaacgattttatcaacgaattaggctgggaagcgttactcaacacccgtggtacaacctggcgtaaactggacgaaaccacccgcaataaaatcaccgatgcggcctctgcggcggcattaatgactgaaatgcctgcaattatcaaacgtccattgctctgcgtgcccggtaagcctatgctgctgggtttcagtgattccagttatcagcaatttttccatgaggtgtaatctatgagctgcccggttattgagctgacacaacagcttattcgccgcccttccctgagtcctgatgatgcaggatgccaggctttgttgattgaacgtttgcaggcgatcggttttaccgttgaacgcatggactttgccgatacgcagaatttttgggcatggcgtgggcagggtgaaacgttagcctttgccgggcataccgacgtggtgccgcctggcgacgccgatcgttggatcaatcccccgtttgaacccaccattcgtgacggcatgttattcgggcgcggtgcggcagatatgaaaggcagcctggcggcgatggtggtggcggcagaacgttttgtcgcacaacatcccaaccatacggggcgactggcatttctgatcacctctgatgaagaagccagtgcccacaacggtacggtaaaagtcgtcgaagcgttaatggcacgtaatgagcgtctcgattactgcctggttggcgaaccgagcagtatcgaagtggtaggtgatgtggtgaaaaatggtcgtcgcggaagtttaacctgcaaccttaccattcatggcgttcaggggcatgttgcctacccacatctggctgacaatccggtacatcgcgcagcacctttccttaatgaattagtggctattgagtgggatcagggcaatgaattcttcccggcgaccagtatgcagattgccaatattcaggcgggaacgggcagtaacaacgttattccgggtgaactgtttgtgcagtttaacttccgcttcagcaccgaactgactgatgagatgatcaaagcgcaggtgcttgccctgcttgaaaaacatcaactgcgctatacggtggattggtggctttccgggcagccatttttgaccgcgcgcggtaaactggtggatgcggtcgttaacgcggttgagcactataatgaaattaaaccgcagctactgaccacaggcggaacgtccgacgggcgctttattgcccgcatgggggcgcaggtggtggaactcgggccggtcaatgccactattcataaaattaatgaatgtgtgaacgctgccgacctgcagctacttgcccgtatgtatcaacgtatcatggaacagctcgtcgcctgatgagtggttctgcaagaggaaataagcatggactggctggctaaatattggtggattctggtgattgtctttttggtaggcgtcctgctgaacgtgattaaagatctcaagcgcgtcgaccataagaaatttctcgccaacaagccggagcttcccccgcatcgtgatttcaacgataagtgggacgatgacgacgactggccgaaaaaggatcaaccgaagaagtaagctgagtgctcaaccgtaggccggataaggcgttaacgccgcatccggcaatggtgaacgatgcctgatgcgacgctcacgcgtcttatcaggccaggtaatctgtcttttacatcatttcaatcacatcatcatcgccaggcttaccgccacttagcgcttcgtcgaaataatgtttcggaatggtataacgcaagtgatccagggcaaattgcatactgcgattgtcgatcgcatggcctaaatcctccacgatatccagcgtcacgtcaccaccggcactgattaacgcttcctgcgccgcaaccgcatgcgccagatcgataaccggatcttcaccgccatgaatcaggtgaattgtcgtggctgtagacgcagtttccggcaggctcgcatagcgtccgttaaaagcaatgacgcgactagcaaggcccggttcggctttaatgctctccagcaccataatcgcgccttgagagaaaccgatgagcgccgtggcgttagcccctactccgctctgtttctgccagtagcgcaccgtttcaataaacgtcggcatgatcgcatccacacgcgcctggcgattatcttccgtaataccctgcacgctaaaccactgacgccccgccggattaccgctcggctccgcgccaccgacactcaccaccagcgcatcaggaaacagcggtgcaaaccagttgcctatttcccccattgccaccgggttatccccgacaccgtggaaaagcagtaacaactgttgcgcaggtttatccgggctttgaacaacaaaatggtcatgtttcatggcgaactccttaactgatgtcattaattttacgccgctgactcacaatgaccatgagataaaattgaaggagtcagtgaaataattgccattgcgttatgcgatcgcgcagacgctcagtgcgaacatcattaagtgcgaacagcgcctgcgcggcctcttcccgctgacggaccagtaacatcttgcggccactaagtttaagtgtggtacataactgcgcatcactggcgtttttctgtaaacgcccacgcagcgccggtaatgccagttcactggtttgtaacagacgcaataagcaacctaagctcgttaatagcggacgatgagcgaaagcaaaaccggccagttcaagccagtcgtcgtcagaaaggacggcatcgtttagtggatcaacaggaagcgtttcgccattccactgcgcgagagcttgcgcatcgcgacgtaaacggtaatgctcacgttcagccagctgtttacccgcatcactcatcggtaacagcgccatcgccgtatagcaaccgctgctggcttcccgatgattacccatccgcaccagcacaaaaccgcagcgttgccagaaacgccataactccccggtgtaaccaaaactcacgctaagatagtcgaggtcttgcgtatattgcaaagcaccagcaataagttgccgccctgtgccttcccgctgacgagccggatgaactgctatccggctgacccgccgtccacgcaatgtcgccgccagtggattgttgccgtgcgccgccaggctctgggccaccagattaccccgcgggcgacgaaaacctgcccataccgcctgactgagttgttgagataatccaccctcatccaccagccacagcgccccggcaatctcgttttcgccagccgcctgtaaaaaatgttgccctggtgcatccatcatccggcgtaaatccagcgggctagtccgatagtgcgcaccagacaagagctgataaacctttaacggcgtttctggatcgctttgccataacgtctgttcaaatgcggaaatgacaatattgccttgtggtgtatgggtgaagttttcatcgtcaaaaaccagtgcctcgctgaccattttttccagcgggcatccctgcgcccagcggatcggctgttgcagttcaaaacggtgtaaatgcggaaagcgagcgcaaaatttcagcaaaaaaccacgtccggtgccttcgtagccctgcaccgtagtggttaacaacgttcgaggaaaacggcttaccagttgatgcaacaatggcgcaggtatggctgcggcttcatcgaccaccagccagtcggcttgctcatcgctggctaacaaggcatccggcgcaataaagcgaaacttctcgcccgcaaattgtgccagtacatccgtactcgcttttgcgggcgcggtgacaatcgctctgcccgcaatacgagaaatgagttgccctgccaacgcgctcttaccgcgcccacgcgcagccgttaccgctgccacgcccggcggcatggtcattagctgctttaagagttgctgttgttctggttgtggtgcgccagtcgcggggtaccagtcagtacggggagtaaaatgcgccaagctgaatggctggttttgccgccagaggatagcctcgttatccgccgtaagtacgcgtttgagatgctggacaaaatgcggcgtcgcaatagggtcagggcaatcactccagcgcaggctgtcggcatcaggttggttttcccactcttcccatacagggagtaacaaaaccagccagcttcccgctttcaacgttccgctaagtgcggcaaaggcagcggcatcaaagccgtggcgggcgtcgaataccgcatgccggaactcgcgcccaagtaaagtttgtagtgcgctgggagaacagtggttttcagcatctggccgcgggctaatccacagccagtcgccaggtaaggcatcacgcaacttaagagtatgctcaaaacaccaaccctcttccccgctcaacaccagcaagcggcggatcccttcacgtttcatttgcgctgttaatgtgtgaagcgcagtcagttcagccatccctgccccggaagttaaatgcttttaccaaaagtattgcattgtgccggatcgccgctgtcgaaaccacgtttaaaccagctgtagcgttgctgagaagtgccatgagtgaaactgtctggtactactcgcccctgactttgctgttgtaaacggtcatcgccgatggcctgcgccgcgttcagcgcctcttccagatcgccggtttccagaacgccttgctgctgcatactatgcccccagacaccggcaaaacagtcggcctggagttccatacgcacagataagcggtttacttccgcctgcgtcgcgttttgttgcagttgacgaactttcggctcgatgcctaacagtttctgcacatgatgaccgacttcatgggcgataacgtacccctgggcaaaatcgccatccgcgccaagtttgtctttcatgtcatcatagaaggagagatcgatataaaccgtgccatccgccgggcaatagaacggccccattatggactggcccgccccgcagccggtacgcgtcattccacggtacatgaccagcttcggttgctgataggtcttacccatcttctcgaactgttgtccccaggtgtcttccgtggttgccagaatcacgctggtgaattttgcggcttcgtcttcatttgggctaatactccgcgtactttgttgttgggaaaccggctgcccggtcatcaacccggttaaatcaacaccatagtagcctgcaaccagcacgactatcagtaaaatcagcccgcctttaccgcttggcaggcgaaaaccgggaccgcccatagatggaccaccagagctgttgcgcctgtcttcaacattgtcactttcacgtcgcccttgccaacgcatagatacctcaacaatatattcattatagaaatgatcgtaggtggttcagaggaagattaccacaggaaagcgggatgaaatggcggaggaatgagcgttcaatgcatatattccgagagcggttgtcttgccgtgccagctgcacggcaagatgatgaacagaaaaatcagtccagctgtacacccaggcggcgggcgacggcttcataggcttcgatcaggccaccgaggctctggcggaaacggtctttgtccattttctccagcgtttctttgtcccacaggcggctaccgtccggggagaactcatcacccagtaccacttcgcctttgtacagaccaaattccagcttgaagtcgaccagaatcagaccagcatcatcgaacagttttttcagcacgtcgttcgctttgtaggtcagctctttcatacgcgccaggttctctttgctcacccagccaaaggtttcgcagtaagattcgttgaccatcggatcgtgcatggcgtcgtttttcaggaacagatcgaacagcggcgggttcagctcaataccttcttcgattccaagacgtttcaccagagagccagcagcacggttacgcacgacacactcaaccggcaccatatccagctttttcaccagacattcggtatcggagagcagacgctccatttgagtcgggatacccgcttcagccagtttgctcataatgaagtagttgaacttgttgttcaccatacctttgcgatcaaactgctcaatgcgcgcgccatcccctgcactcgtatcattgcggaattcgagcaccaacaggtccgggttttccgtgctgtatacggttttcgctttaccacgatacaactcagcttgcttttgcatctttatcactcctgggtgtgaattaacgttttaaaatcttttgctgtctggtgtgccggatgttttgtcggatgcggcgtgaacgccttatccgaactacgtccgacaaacaaatttcgtgcgaattaccgctaaaatcgcgttttcctgcagacgcacacgtttgcgtatcatatcagaaaaaagggccggatgattccagccctgtatttttacttgctaaacgcagcctggaagacagctaccagcgcgtcgttctgactctgagtcagagtatgacctttcggatcgatgaactgtaggctgctgcggttatctaaatcgccaacctgcagtttatagtcaccggatgccaggcctggatcgctcgcgcccagttcctgccagtcgctgtcagacagcggcttataagttacggccatgttgccctggctacgggtgctgtcggtcactttcatgcccactttttccagcgccgctggcagacgttgccaaaccacattgaacggcccgcgtacgaccagcattggtaaaccggtgtcatcagctgcactttgtacgtccatagtggtggaggcacgattttgcgcagcgttcgcggcgtcagtggcagatttatccagaccggcggaaataacgttcatcatctccgtgctgtaacgctgcatggaagccgcgtctgcaaccggtttgcccgcctgttccaggttcagcagtttaaccgtaaccgcctgctgataaccctgcggcttaacagagatttgataacgaccacgatactgctcgtcttcgtccagacggttccattgtacccaatcggtggtcagtgtctgaccagcatcatcacgttgggtgatggtgtagtttttcgcctgcagcacgctaaccacctgcggccacagagtattgccacgaccattttccaccagcaaactagcggtatcgcccgtgaactgggtacgcgcgccagaaaccagtgccagcggctgggctggtggacgaatgtccagcgccttaccgacagcaccactaccgttggtcaccgggattgcataatcaccggaggtcaccggcaaaatcattccagccggggcatgaagctccgcaagcggtgccgcttccaggtaggcttcatcaccactgacctgacgcttatagcgactgtcagaactacaggcagcgagtaataaaacaaggctaacacccgcaacctttgccaggcggctcttttgaacagagtaagccatcaaatctccctaaactttacagcaaaccggcatgcttaagcgccgctctgaccgtctcacgaccactgtcggtgattggtgtcattggcaggcgcagcgtatcggtcgccacaagacccagttccttacatgcccatttcaccgggattggattgggttcgacaaatagtttgttgtgtaatggcatcagacgctgattaataacgcgtgcctcggcaaaatgcccttctgctgccagtttgcacatctgggccatatcacgcgctgcgacgttagccgtaacggaaataaccccatgaccgcccaattgcatgaagtccagcgcgctcgcatcatcgccgctcagcagaacaaaatcatcactaaccagctctttgatctggtttacacgcgttaagttccctgttgcctctttgattccgataatattttttactttcgccagacggcccaccgtttccgggagcagatcgcagccagtacgggacggcacattatacagaatttgcggcaggtcagtatgctcagcgatggctttgaaatgctgatacaaaccttcttggctcggacgattgtagtaaggggttaccgtcaggcagccgacgataccactgtcattgaagcgctgcgtcaggctaatggcttccgcagtagcgttagcgccggtcccggcaattaccggaatgcgcccatcagccagatccagcgtcatcatcaccacatcagcatgttcgtcatgatttaaggtagcggactcgccagtggtgccaacagaaacgatcgcgctagtaccgctggcgacatgataatcaatcagttttttcaagctagcccgacagacattacctttttcatccatcggagtaacaatcgcgacaatacttcccgtgaacatgggccatcctctgtgcaaacaagtgtctcaatggtacgtttggtatggcattaaaagcaagcagacagaaccgttctgattgttgtatgcatgtttttttatgctttccttaagaacaactcaccccttaaaggaataaccagtttgacactgagtagccaacattatctggtgatcactgcgttgggtgccgatcgccctggaattgtgaacaccatcacccgtcatgtcagtagttgcggctgtaatattgaagacagtcgcctggcgatgctgggagaagagttcacgtttattatgctgctttccggtagttggaatgccattactctgattgaaagtacgttaccgttgaaaggtgccgaactggatcttttaatcgtgatgaagcgcacgacggcgcgtccgcgtccgccaatgccagcatctgtctgggttcaggtcgatgtggcagactccccgcatttaattgaacgcttcacagcacttttcgacgcgcatcatatgaacattgcggagctggtgagccgcacgcaacctgctgaaaatgaacgggctgcgcagttgcatattcagataaccgcccacagccccgcatctgcggacgcagcaaatattgagcaagcgttcaaagccctatgtacagaactcaatgcacaaggcagtattaacgtcgtcaattattcccaacatgatgaacaggatggagttaagtaatgaatccactgaaagccggtgatatcgcaccgaaatttagcttgccggatcaagacggagaacaagttaatttgaccgacttccagggacagcgtgttctggtttatttctacccgaaagccatgacccccggctgtaccgtacaggcctgcggcttacgcgataacatggatgagttgaaaaaagcgggcgttgatgtgctgggtatcagcaccgataaacccgaaaaactctcccgttttgcggaaaaagagctgcttaactttacgctcctgtctgatgaggaccaccaggtgtgcgaacaattcggcgtctggggtgaaaagtccttcatgggcaaaacctacgatggcattcatcgcatcagcttcctgattgacgctgatggcaaaatcgaacatgtctttgacgatttcaaaaccagcaatcaccacgacgttgtgctgaactggctgaaagaacacgcctgattactttgctccattccgtgctggctgcgcttgcggccagcatacctcacttctcgtgatcaagatcacattctcgctttcccctgcgacacgggtgtcgaatccattttttgctgaacgttaatgaccatcatttttgtaccgttcagaatccagttaatacataacttattgaatatattgagttaatcagaatggcatcctttatgcaatatgaaatgcaatgtttcatatcattttcaaggagccgacatgaaccgctttgtggtggccgaaccactgtggtgtacaggatgtaatacctgtctcgctgcctgtagcgacgtgcataaaacgcaaggtttacagcaacacccgcgcctggccctggcgaagacgagtacaatcactgcccctgtcgtgtgtcatcactgtgaggaagccccttgcctgcaggtctgcccggtcaatgccatctctcagagggatgatgcgatccaactcaacgaaagcctctgtattggctgcaagctttgcgccgtggtctgcccatttggcgcaatcagcgctagtggaagccgtccggtgaatgcccatgcgcaatatgtttttcaggctgaaggcagtctcaaagacggcgaagaaaacgcgccaacacaacatgctttgctgcgctgggaacctggtgtccagaccgtcgcggtgaaatgcgacctgtgtgatttcttgccagaaggtccggcctgcgttcgcgcttgcccgaatcaggcgttacggctgatcaccggtgatagcctgcaacgtcagatgaaagaaaaacagcgccttgccgcaagctggtttgccaatggcggggaggatcccctttccctcactcaggagcaacgctaatggatgccctgcaattattaacctggagcctgattctctatctgtttgctagtctggctagcctgtttttactcggtctggacagactggctattaagctttccggcatcacaagcctggtgggcggcgtgattggcatcatcagcggaattacgcaattacatgctggtgtaactttagtcgcccgttttgcccccccttttgaatttgccgatttaaccctgcgaatggatagcctcagcgcatttatggtgctggttatctccttgctggtggtggtttgttctctctatagtttgacttatatgcgcgaatacgagggcaaaggcgcggcggcgatgggcttctttatgaatattttcatcgcaagcatggttgccctgctggtgatggacaacgctttttggttcatcgtgctgtttgaaatgatgagcctgtcttcctggtttctggtcattgccaggcaggataaaacgagcatcaacgctggcatgctctacttttttatcgcccacgccggaagcgtgctgataatgatcgccttcttgctgatggggcgcgaaagcggcagcctcgattttgccagtttccgcacgcttagtctttctccggggctggcgagcgcggtgttcctgctggcctttttcggttttggcgcgaaagccgggatgatgccgttgcacagctggttgccgcgcgctcaccctgccgcaccaagccacgctagcgcgttgatgtctggcgtaatggtcaaaataggtattttcggcatcctgaaagtagcgatggatctgctggcgcaaacgggtttgcctctgtggtggggcattctggtgatggcgatcggcgcaatctccgcgctcctgggcgtgctatatgcgctggcggaacaggatatcaaacggctgctggcctggagtaccgtcgaaaacgtcggcattattttgctggcagtcggtgtggcgatggtcggtctgagtctgcacgacccgctgctcaccgtggttggactgctcggcgcactgtttcatctgctcaaccatgcgctgttcaaagggctgctatttctcggcgcgggagcgattattagccgtttgcatacccacgacatggaaaaaatgggggcactagcgaaacggatgccgtggacagccgcagcatgcctgattggttgcctcgcgataagcgccattcctccgctgaatggttttatcagcgaatggtacacctggcagagcctgttcagtctaagtcgtgtggaagccgtagcgctacaacttgcgggtcctattgctatggtaatgctggcagtcactggtgggctggcagtaatgtgcttcgtaaaaatgtacggtattactttctgtggtgcgccgcgcagtacacacgctgaagaggcacaggaagtgccaaatacgatgatcgtcgccatgctactgctcgcggcactctgcgtattaattgcgcttagtgccagttggctggcaccgaagataatgcatattgcccatgcgtttaccaatacccctcccgccactgtcgccagcggaatagcacttgtacccggcacgtttcatacacaggtcacccccagtttactgttgctgttactactggcgatgcctttgctgcctggcctttactggctgtggtgtcgtagccgccgcgcagcgtttcgtcgcacaggagatgcctgggcatgcggctacggctgggaaaatgcgatggccccgagtggcaatggcgtgatgcagccgctgcgtgtggtcttttctgcgctatttcgtctacgacaacagctcgaccctacgctgaggctaaataaaggtcttgcgcacgtcaccgccagggctcagagcacagaacccttctgggatgagcgggtgatccgccccatcgtgagcgccacccaacggctggccaaagaaatacagcatctgcaaagcggcgactttcgtctctattgcctgtatgtggtcgccgcactggttgtgctgctaatcgctattgccgtctaaggaaatcaccatgagacaaactctttgcgacggatatctggtcatttttgcgttagcacaggccgtgattctgctgatgctaaccccactttttacgggtatttcccggcagatacgcgcgcgtatgcactcccgccgcgggccggggatctggcaggattatcgcgatatccacaaactgtttaaacgccaggaagttgcgccgacatctagtggtctgatgttccgcctgatgccgtgggtattaatcagcagcatgctggtgctggcgatggccttaccactgtttattaccgtttccccttttgcgggcggcggcgatctgatcacccttatctatcttcttgccctgtttcgttttttctttgctctttccgggctggataccggaagtccgtttgcgggagtcggtgccagtcgcgagttgacgctcggcattctggtcgaaccaatgcttattctcagtctgctggtattggcgctgatagcaggttccacgcatatcgagatgatcagcaatacgctggcgatgggctggaacagcccgctaaccaccgtactggcgttactggcctgtggttttgcctgcttcattgagatgggaaaaattccctttgatgttgctgaagcagaacaggaattacaggaaggcccgctgaccgaatattccggtgccgggctggcgctagcgaaatgggggctggggctgaaacaggtcgtgatggcaagtctgtttgtggccctgtttctgccctttgggcgcgcgcaagaactttctctcgcctgcctgctgactagtcttgtcgttacgctgctcaaggttttgctgatttttgtactggccagtatcgcagaaaacacgctggcacgcgggcgttttttactcattcaccatgtgacctggcttggcttcagccttgctgcgcttgcatgggtcttctggttaaccggtctgtaaggagcactgacggaatatggaaaatcttgctctgacgacgttattgctgccttttatcggcgcactggtcgttagctttagcccacaacgtcgggccgccgaatggggggttttgttcgccgcgctgaccacgctgtgcatgttgagtctgatctccgcgttttatcaggccgataaagttgccgtcacgttgacgttggtcaacgtgggggatgtggcgttgtttggcctggtcattgatcgcgtgagtacgctgattctgtttgtggtggtgtttctcggtttgctggtcacgatctactccacgggttatctgacggataaaaatcgcgaacacccgcataacggcacgaatcgttattacgcatttttactggtgtttatcggcgcgatggcgggactggtactctccagcacgctgctcggtcagttgttgttttttgaaattacaggcggctgctcctgggcgttgatcagttattaccagagcgataaagcgcagcgtagtgcactaaaagcgttacttatcactcatatcggcagcttggggttgtatcttgccgccgccacgctgtttttgcagaccggaacgtttgcgcttagcgcgatgagcgagttacacggcgacgcacgttatctggtttatggcggcatcctgtttgccgcgtgggggaaaagcgcccagctaccgatgcaagcgtggctaccggacgcaatggaagcgccaacaccgatcagcgcctatctccacgccgcaagcatggtgaaagtgggcgtttacatttttgcccgcgctattatcgacggcggcaatatcccgcatgtgattggcggcgttggcatggtcatggcactggtcaccattctttatggctttctgatgtatttgccacagcaggatatgaagcggttgctagcctggagcaccatcactcaacttggctggatgttcttcggcttgagcctctccatcttcggcagccggctggcgctggagggcagcatcgcctacatcgtcaaccacgcgttcgctaaaagcctgtttttccttgtagcaggtgcgctgagttacagctgcggcacgcgcttgttgccgcgtctgcgtggcgtattgcacaccctgccgttgccaggcgtgggtttctgcgtggcagcgctggcgattaccggcgtgccgccgttcaacggcttcttcagtaaattcccgctgtttgctgccggttttgcgttgagtgtggagtactggatcctgctgcccgccatgattcttctgatgattgaaagcgtcgccagtttcgcctggtttattcgctggtttggtcgcgttgtgcctggcaaaccgagcgaggccgtcgccgatgccgcaccgctgccaggaagtatgcgcctggtgttgattgtactgattgtgatgagcctgatttccagcgtaatcgccgcgacctggttgcagtaaggagatgatgaatgaccggttctatgatcgtaaataatctggcgggactgatgatgctgacaagcctgtttgtgattagcgtcaaaagctatcgcctgagttgcggattttacgcctgccagagtctggtgctggtgtctattttcgccactctcagctgcctgttcgccgcagagcaactgctgatctggtccgccagcgcctttatcaccaaagtgctgctggtaccgttaatcatgacttacgctgcacgaaatattccccagaacatcccggaaaaagcgttattcggtccggcaatgatggcactgctcgcggcgttaattgtcctgctttgcgcatttgtcgttcagcccgtgaagctaccgatggctaccgggctgaaaccggcgctggcggtagcgttaggtcattttctgcttggcctgctgtgcattgtcagccagcgcaatatcctgcggcaaatttttggttactgcctgatggaaaacggctcccatctggtgctggcgcttcttgcctggcgagcaccggaactggtggaaataggtatcgctaccgacgccatcttcgccgtcattgtgatggtgttactggcaagaaaaatatggcgtacccacggcacgctggacgtgaacaacttgaccgcgctgaagggataatgagatgagttattctgtgatgttcgctttactcctgctcacgccgctgctttttagcctgctctgttttgcctgccggaaacggagactttctgcgactcgcacggtgaccgtattacatagcttagggatcacactgctgctgattctggcactctgggtggtccaaactgccgctgatgcaggagaaatattcgctgcgggactgtggcttcatattgatggtctgggcggtttgttcctcgccattcttggtgtgattggctttctcaccggtatttacagcattggctacatgcgtcatgaagtggcacacggcgagcttagtcccgttacgctgtgcgattactacggtttcttccatctgtttttgttcaccatgctgctggttgttaccagcaataacctgattgtgatgtgggcggcgatcgaagccaccaccttaagcagcgcgtttctggtaggcatttacggtcagcgtagtagcctggaagctgcatggaagtacatcattatttgtactgttggtgtcgcttttggtctgttcggtaccgtgctggtatacgccaacgccgccagcgttatgccgcaggcagaaatggcgatattctggagcgaggttcttaagcaaagctccttgcttgacccaacattaatgctgttggcctttgtgtttttgctaattggctttggtaccaaaaccgggctatttcccatgcacgcctggctgccggatgctcacagtgaagcgccgagtccggtcagcgccctgctctccgccgtattgctgaactgcgcgctgttggtgctgattcgctattacatcattatttgccaagccatcggcagcgatttccccaaccggttgttgctcatcttcggcatgttgagcgttgccgtggcggcatttttcattctggtacagcgggacattaagcgtctgctggcgtactccagcgtggagaacatggggctggtcgcggtggagctaggcattggcgggccgctgggaatttttgccgcgctgctgcacatcttaaaccacagtctggcaaaaacgctgctgttctgcggttccggcaatgtactgctcaagtacggcacgcgcgatctcaacgtcgtctgtgggatgctcaaaatcatgccatttaccgccgtgctgtttggcggcggtgcgctggcgctggcagggatgccgcccttcaacatttttcttagcgaatttatgaccattaccgccggactggcacgtaatcacctgctgattatcgtcctgctgttattgctgttaacgctggtgctggcgggcctggtacggatggctgcgcgggtgttaatggcgaaaccgccgcaggccgttaaccggggtgatctcggctggttgaccaccagcccaatggtgattctgctggtcatgatgctggcgatgggaacgcatattccacaacctgtcatcaggatcctggcgggcgcttccactatagtcctcagtgggacgcacgatctgcctgcacaacgtagcacctggcatgattttttgcctagtggcaccgcatctgttagcgagaaacacagtgaacgttaatagtagcagtaatcgtggcgaagcgattctcgccgccctgaaaacgcagttccccggcgcggtgctggatgaagagcgacaaacgcctgaacaggtcaccattacggtgaaaatcaatctgctgcctgacgttgtacagtatctttattatcaacatgatggctggcttccggtcctgtttggcaacgacgagcggacacttaacggtcattacgcggtttattatgcccttagtatggaaggggccgaaaaatgctggattgtggtgaaggcgctggtcgatgccgacagtcgggagtttccgagtgtcacaccgcgcgtccctgccgcggtctggggcgagcgagaaattcgcgatatgtacgggctgattccggttggcctgccggatcagcgtcgcctggtgttgcccgatgactggccggaagatatgcatccgctgcgcaaagatgcgatggattatcgactgcgccctgaaccgacgactgattccgaaacgtatccgtttatcaatgagggcaacagcgatgcgcgggtgatccctgtcggcccgctgcatatcacctccgatgaaccgggtcacttccgcttgtttgtggatggcgagcaaattgtcgatgctgattaccgcctgttttatgtccatcgcggcatggagaaactggcagaaacgcggatgggctacaacgaagtgaccttcttaagcgaccgcgtgtgtgggatttgcggttttgcccacagtgtggcctataccaatagcgttgaaaatgcactggggattgaggtgccgcaacgagcacatactattcgcagcattctgctggaagtcgaacggctacacagtcatttgcttaaccttggcctctcctgccatttcgttggttttgataccggctttatgcaatttttccgcgtgcgggaaaagagcatgacgatggcggaattgctgatcgggagccgtaaaacctacggtctgaatctgattggtggtgttcgccgcgatattctcaaagagcaacgtctgcaaacgctgaaactggtgcgcgagatgcgcgccgacgtgagcgagctggtagagatgctgcttgctacgccgaatatggaacaacgcactcagggcattggcattctcgaccgacaaatcgcccgtgatttgcgctttgatcacccctacgccgactacggcaatattccaaaaacactgtttacctttaccggcggcgatgttttctcccgcgtgatggtccgtgtcaaagagacgtttgatagcctggcaatgctggaatttgccctcgacaacatgccggataccccactgctgaccgaaggctttagctataaacctcacgcattcgcgctgggctttgttgaagcgccacgcggtgaagacgtgcactggagcatgctcggtgataaccaaaaattgttccgctggcgctgccgtgccgccacctacgccaactggccggtgttgcgttacatgctgcgcggcaataccgtttctgacgcaccgctgattatcggtagccttgatccctgctactcctgtaccgaccgtgtgacgctggtagatgtgcgcaagcgccagagtaaaaccgtgccgtataaagagatcgaacgctacggcattgatcgtaaccgtagcccgctgaagtaaggacagaagatgctgaagttactgaaaactattatgcgcgccggaaccgcgacggtgaaatatcccttcgcgccactggaggtcagccctggctttcgcggaaaaccggacctgatgcccagccaatgtattgcctgcggtgcctgcgcctgtgcttgtccggcaaatgcgctggctatccagaccgacgaccagcaaaatagccgcacctggcagctctatctggggcgttgtatttactgcggacgttgtgaagaagtgtgcccgaccagagccatccagcttaccaataactttgaactgaccgtcaccaataaagccgatctctatacccgcgcgacgttccatctacaacgttgcagccgttgcgaacgcccgtttgccccgcaaaaaaccatcgcactggctgctgaattgttagcacagcaacaaaatgcgccacaaaaccgcgaaatgttgtgggcgcaagcgagcgtctgcccggaatgcaaacaacgcgcgacgctgatcaacgacgatacagatgtactgctggtggctaaggagcagctatgagtccagtgcttacacaacatgtcagccagcccatcacgctggacgagcaaacgcaaaagatgaagcggcatttgctacaggatatccgtcgcagcgcttacgtttatcgcgtcgattgcggcggctgcaacgcctgtgaaatcgaaatttttgctgccattacaccagtattcgacgcagaacgttttggcattaaggttgttagtagtccgcgtcacgccgatattttgttatttactggcgcagtcacccgggcgatgcgtatgcctgcacttcgggcgtatgagtctgcccccgatcataaaatttgtgtttcctacggcgcgtgcggtgtcggcggcggtattttccacgatctctacagcgtctggggcggtagcgacaccattgtccccattgatgtttggatccccggctgcccgccaacaccggccgccaccattcacggtttcgccgtggcgctcggtttgctgcaacagaagattcacgctgtggattatcgcgatcccaccggggtgactatgcaaccgttgtggccgcagatcccgccaagtcagcgtatcgccattgagcgagaagcgcggcggctggcgggctatcgtcaggggcgagaaatttgcgatcggctcctgcgccatttaagcgacgatcctacaggaaatcgggttaacacctggttgcgcgatgccgacgatccacgtctcaatagtatcgttcagcaactctttcgcgtactccgggggttacatgactgaagagtgcggggaaattgttttctggacgctgcgaaaaaagtttgtcgccagtagcgacgagatgccggaacacagctctcaggtaatgtattacagcctagctatcggccatcacgttggcgtgattgattgtctgaatgtcgccttccgctgcccactgacggaatacgaagattggcttgcactggtcgaagaggagcaagcccgacgtaagatgctgggggtgatgacttttggtgagattgttattgacgccagccacaccgccctgttgacccgggcattcgcgccactggcggatgacgcgacgtctgtgtggcaggcgcgtagcattcaattcattcatctgttggatgaaattgtgcaggaaccggccatctatctgatggccagaaaaattgcgtgagaaggatttctcattaataaggactgttgatggctatgagtgacgaggcgatgtttgccccgccacaaggaataacaattgaagcggtaaacggaatgctcgcggagcggttagcacagaaacacggcaaggcgtctttattacgcgccttcatcccgctgccgccgccgttcagcccggtacaacttattgaactgcatgttctcaaaagcaacttctattaccgctaccatgatgatggcagcgatgtgacggcaacaacagagtatcagggcgagatggtcgattatagccgtcacgccgtccttctcggcagtagtggaatggcggagctacgctttattcgcacccacggcagtcgttttacttcccaggattgcacactgtttaactggctggcgcggataatcaccccggttctgcaaagttggctcaatgatgaagaacagcaggtggcgctgcgtttgctggagaaagatcgcgatcatcatcgggtactggttgatattactaatgcagtgctgagtcatcttgatctcgacgatctgatcgctgacgtcgctcgtgagatccatcattttttcggtctggctagtgtcagtatggtactgggcgatcatcgaaagaacgagaagttcagcctgtggtgcagcgatctttctgccagtcattgtgcgtgtctgccacgctgtatgcctggcgaaagtgtattgctgacacaaacgctacaaacccgacaaccgaccttgacgcaccgtgcagatgatctgtttctctggcaacgcgacccgttattactcttacttgcatctaacggctgcgaatctgcgctccttataccgcttacctttggcaaccatacaccgggtgcattgttgctggcgcatacctcttccactctctttagtgaggaaaactgccagctactacaacacatagccgatcgcatcgctattgccgttggcaatgccgatgcctggcgtagcatgaccgatttgcaggaaagtttgcagcaagaaaaccaccagcttagcgagcagctccttagcaatctgggcatcggtgacattatctatcaaagccaggcaatggaagacctgctccagcaggtagatattgtggcgaagagcgacagtacggtgttgatttgtggtgaaaccggaactggcaaagaggtgatcgccagagcgatccatcaacttagcccgcgacgcgacaagccgctggtcaaaatcaactgcgctgccatccccgccagtcttctggaaagtgagttattcggtcatgacaaaggggcgtttactggtgcgattaatacccatcgtggtcgttttgaaattgccgatggcggcacgttgtttctcgatgaaattggcgatctgccgttagaacttcagcctaaactgctgcgcgtattgcaggagcgggagattgagcgtctcggcgggagtagaacgatcccggtgaatgtcagagtcattgccgccaccaaccgtgatttgtggcaaatggttgaagatcgccagtttcgcagcgatctcttttatcgcctgaatgtcttcccactggaattgccgccgctacgcgaccgtccggaagatatccctcttttagcaaaacatttcacgcaaaaaatggcgcgccatatgaatcgcgcaattgacgccatcccgaccgaggcactacgccagttgatgagctgggattggccgggcaacgtgcgcgagctggaaaacgtgattgagcgggcggtactgttgactcgtggtaacagtctgaatttacatctaaatgtccgacaaagccgtttactgccgacgctaaatgaagatagtgcgcttcgcagtagtatggcgcagttactgcacccgacgacgccagagaatgacgaagaagaacgtcagcgcattgttcaggtattgcgagaaaccaatggcattgttgccgggccccgtggcgcagcgacgcgattagggatgaagcgcaccacgctgctgagtcgaatgcagcggctggggatcagcgttcgcgaggtgttgtaatctgcttttgcaggagtatgcatgagaaacaaactctctttcgacttgcagttgagcgccagaaaagcggcaatcgctgaacggattgccgcccataaaattgcccgcagtaaagtgagcgtctttttaatggcgatgtccgctggcgtgtttatggcgatcggatttactttttacctttccgttatcgccgatgccccgtctagtcaggcattaacccatctggtgggcggcctttgctttacactcggctttattttgctggcggtttgcggcaccagcctgttcaccagcagcgtaatgacggtgatggcaaaaagtcggggcgtcattagttggcgaacttggctgattaacgcacttctggtggcctgcggtaatctggcaggtattgcctgtttcagtttgttaatctggttttccgggctggtgatgagtgaaaacgcgatgtggggagtcgcggttttacactgcgccgagggcaaaatgcatcatacatttactgaatctgtcagcctcggcattatgtgcaatctgatggtttgcctggcgctgtggatgagttattgcgggcgtagcttatgcgacaaaatcgtcgccatgattttgcccatcaccctgtttgtcgccagtggctttgagcactgtatcgccaatttgtttgtgattccgttcgccattgccattcgccatttcgcccctccccccttctggcagctggcgcacagtagcgcagacaattttccggcactgacggtcagccattttattaccgccaatctgctcccggtgatgctgggtaatattatcggcggtgcggtgctggtgagtatgtgttatcgggctatttatttacgtcaggaaccctgaaaaatcagcccggcgaaacagttcgtcgggctgaagattattcttgcgcgatttgcccatcgggccaggcatgaatcacggctttgatcagcgtcgccaacggaatggcgaagaatacgccccagaatccccacaaaccaccgaagatcaccacgcttaaaataatcaccagcggatgcaggttaaccgcttcggagaacaacaccggcactaacaggttgccgtccagcgcctgaataatcagatacaccgcgaagcagctccagaattcagtacctgcgccaaactggaatagcgccacgccaaccaccggaatggtcaccacaaatgcgccaatgtacggaataagaacgctgaagccgaccagcactgccagcagcaggctatagttcagcccgaagagcaagaaccccagccaggtggcgatccccaccacgatcatctccagcactttgccgcggatatagttggtgatttgttgattcatctccttccacacctgtcctgccagcccacggttacgcggcagcacccggcgaacggcgttcagcatctgctctttgtctttcagcaggaagaagaccatcaatggcaccagcaccagatagacggctatggtcagcaaaccgaccaggctggcgagggaaattttcaccacgctatcgcccatggtcagcatccgactgcgcatattttcggccattgcatcaataatgcccgcgtccattaacgccggatagcggcgcggcaacgtggcggcaaagtcagaaagcttattgagcatccccggcatatcgcggattaagtagatgccctgttgccaggcgataggcagtaccacgaacgccatcagtagcaatataccgacgaaaaccaccaatacaatgctcgtcgcccagcggcgggagcagccaatagattgcagacgcacggttggccattccagcaaataggccagcacaatagccaccagcaacggagcaagcaggccactaaagaaaaagataatgccaaatccggcaactaaaataaccagcaaggcaatcgcttccgggtcgctaaaacggcggcgataccattgcatcaacatttcgagcataaagaccttccctgaacctcaagagcgggattgcgatccgcaattgtatcgaaatgtcacaaaaaagacttcgctttttatgacggattcaggaaactgaaaagtcatttgagtgggctaatcttcgccgttacactcaaaggcggcgcggtgggaacgatatttcacagtatcggtcaaatgactatctccagaaatacaggatagaggttatgttcaggcagttgaaaaaaaacctggttgcaaccctcattgctgctatgaccattggtcaggtagccccggcgtttgccgacagcgcagacaccttgccggatatgggaacctccgcaggaagcacgctttccattggtcaggaaatgcagatgggcgactattatgtccgccagctacgcggcagcgcgccgttaattaatgacccgctgttaacgcaatatattaatagcctggggatgcgtctggttagccatgccaatagcgttaagacaccgtttcatttttttctgatcaacaacgacgaaattaacgcctttgctttctttggcggcaacgtggtgctgcactctgccctgttccgttattccgataacgaaagtcaactggctagtgttatggcgcacgaaatctcccacgtcacccaacgtcacctggcgcgagcgatggaagatcagcagcgcagcgcgccgctgacctgggtcggcgcgttaggttctattttactggcgatggccagtccgcaggcggggatggcggcgctgaccggtacactggcgggaacgcgtcaggggatgatcagtttcacccagcaaaatgaacaggaagcggaccgcattggtattcaggtgctgcaacgcagcggattcgatccgcaggcgatgccaaccttcctcgaaaaattactcgatcaggcgcgttactccagccgcccgccggaaattttattgactcacccgttgccggaaagtcgtctggcagatgcccgcaaccgtgctaatcagatgcgcccgatggtggtgcagagcagcgaagatttctatctggcgaaagcgcgcacactggggatgtataattccggacgtaaccagctcaccagtgatttgctggatgaatgggcgaaaggaaacgttcgtcagcaacgagcagcacaatatggtcgtgctttacaggcgatggaagccaataaatacgacgaggcgcgtaaaacgctgcaaccgttactggcggcagaacctggcaacgcatggtatctcgatctggctactgatatcgatcttgggcaaaacaaagccaatgaggcgatcaatcgtctgaaaaatgcccgcgatttacgcaccaatccggtgttgcagctcaacctggcgaacgcttatttgcaaggcggtcaaccacaagaagcggccaatattctgaatcgctacacctttaataataaagatgacagcaacggctgggatttgctggcacaggcggaagccgcgctaaataaccgcgatcaggagctggctgcgcgagcagaaggttatgcgctcgccggacgactcgatcaggccattagcctgttgagtagcgccagtagccaggtgaaattaggcagcctgcaacaagcgcgttacgatgcgcgcatcgaccagttgcgccagctgcaggaacgctttaagccttataccaagatgtaattcgcattaaaggaagaacaatgaccaaacaggtaaaaatctaccataacccacgctgtagtaagagccgggaaacgctgaacctgctgaaagaaaacggcgtggagccagaagtggtgctctaccttgagacacccgccgatgcggcaacgctgcgcgatttgctgaaaatactggggatgaatagcgcccgtgaattgatgcgccagaaagaggatctttataaagaactgaacctggctgacagtagccttagcgaagaggcgctgattcaggcaatggtggataatccgaagctgatggagcgcccgattgtggtcgcgaatggcaaagcgcggattggtcgtccaccggagcaggtactggaaatcgtgggttaagatgtgctccatcgctagttgaagcacattgccggatgcgacgcttgccacgtcttatccggcctacgaatactatggattaacttcgcgtagttcggataaggcgttcgcgccgcatccgacaataaacaccttatttacaacttcagaatttctttcacaaacggaatggtcagcttacgttgcgcggtaatgctcgcacgatccaactgatccaacgtcataaatagcgtgcgcatttctctgtcgagccgcttcagcaagaaacgccccacatcttccggcagttcaaaaccacgcaaacgcgcgcgtaactgtagcgcctgcaacttatcttcatcagaaagtggctgcaatttgtagatctgcccccagtcgagtcggctcgcgagatccggtaatcccagattcaactgccgcggtggacgatcgccggtgatcaacaaccgtgttttgccgctttccagaattcgattgtagagatcgaaaatcgccatctcccacaactcatcgcctgcaatacactcaatgttgtcgatacagaccaggctcaaatgctccataccgtcgagcacttccggaacaaaccaggtgcgtttatccagcgggacatagcccaccgcatcgccacgctggctcaattccgcgcaagccgcgtgcagcagatggctgcgccccgcgccttcgcgtgcccagagatagatgtaaccgctatgttcctgacgcagcacgttttgcagcgcggccagtaaagaggagttatcccccggccagaaacttgcaaaggtttcgtcgtcaggaagataaagtggcaaagagagctgtgccggtgtgttcagagatacctcaaccaggatttcacaaaatcggctgaagtttaccacagaatcccatgatgtttgaaccgggcagcaacactgcccggtcggtacattatttgtctgttatatccgcgtcttctgcgtccagcaccacttcttcagggcgcagcacactgatcagtttgaagatcaaacttaagccgataccgacgatggtcgccagcgccataccttttaactccgccgcgccgatgtttaccttcgcgccactgacgccgatgatcaaaatcacggaagtcaggatcaggttctgtgctttgttgtaatccactttgctttcgatcaaaacacgaataccggaagcaccgatgacaccataaagcagcaggctaacgccgcccatcaccggcaatgggatcatctggatagcggcagccagtttaccgacgcaggaaagcaggatagcgaaaatcgccgccccgccgataacccaggtactgtaaacacgggtgatcgccatcacgccaatgttttctccgtaagtagtatttggcgtagagccaaagaagccggaaatcacggtgctcaagccattagcaaacatgctacggtgcagacctggatcgcgcagcagatcttttttgacgatattagccgttactaccaggtgccctacgtgttcggcaataaccactaacgccgctggcagaatagtcagaatggcaaaccactcgaagcgcggcgtatagagggttggcagcgcaaaccagtgagcattaataatcggcgtggtatcgacaattcccattgcgaaagagagcgcgtaccccaccagcacgccaattaaaatcgggataattgccaggaaaccacgaaacagcacggaacctaaaaccgtgaccgccagggtggtaatagagatgatgatggttttggagtctggcgtttgcccttcagccgggagtaaacccgccataccggcagctacgcccgccagctccagaccgatgacggcaacgattgcgcccattgccgcaggtggaaacagcacgtccagccagccggtccccgctttcttcacgataaaagaaaccaggcagaacagcacgccgcacataataaagccgcccagcgcgacttcataccctaacggcaacagtaacaataccggactaataaaggcaaagctggaaccaagataagccggaattttccctttacagatgaagagatacagcagcgttccaataccgttaaataacagtacagtcgccgggttaatatgaaataagacgggcaccaggacggttgcaccaaacatggcgaacaaatgttgcaaactaagcgggattgtctgtaaaagtggcggtctttcactcaccccgatagcacggcgcgtcatagtattatcctctgtattatgtgttataggcgctttactcaaaaaaaagccgactcttaaagtcggctttaattatttttattctttatttcgtaccaaagattttgtcaccggcatcgccgaggcccggaataatgtatccgtgctcgttcagtccctgatcaatgcttgcggtatacagttcgacgtccgggtgcgctttttccagcgcagcgataccttctggcgcagctaccagcaccagaactttgatgctgctgcagcccgcttttttcagcaggtcgatggtcgcgataacggaaccaccggttgccagcattgggtcaacgatcagcgccatacgctcatcgatgttagaaaccagtttctggaagtacggtaccggctccagcgtttcttcattacggtacataccgacaacgctgatgcgcgcgctcggaacgttttccagcacaccgtccatcataccaagacccgcacgcagaattggcacaacggtaattttcttacctttgatctggtcgatttctaccgggccgttccagccttcgatagttactttttccgtttcgaggtcggcggtcgcttcgtaagtcagcaggctacccacttcggaagcgagttcgcgaaagcgcttggtgctgatatcttgctcacgcatcagtcccagcttgtgtttgacgagtgggtgtttgacttccacgatcttcatactctttctcctttgaggggcagccacaaaaaaaatcgacggattatacctcctttcttcaaggcggcaatattcttttcgttgactttagtcaaaatgataacggtttgagataaagttattttatattcagatggttatgaaagaagattattccatccgaaaactaacctttaccctggcacaagtcttctttcgccgcgcgcctggggaaaagacgtgcaaaaaggttgtgtaaagcagtctcgcaaacgtttgctttccctgttagaattgcgccgaattttatttttctaccgcaagtaacgcgtggggacccaagcagtgaccgataaaacctctcttagctacaaagatgccggtgttgatattgacgcgggtaatgctctggttggaagaatcaaaggcgtagtgaagaaaacgcgtcgtccggaagtgatgggcggtctgggcggcttcggtgcgctgtgtgcattgccgcaaaaatatcgtgaacccgtgctggtttctggcactgacggcgtaggtaccaagctgcgtctggcaatggacttaaaacgtcacgacaccattggtattgatctggtcgccatgtgcgttaatgacctggtggtgcaaggtgcagagccgctgtttttcctcgactattacgcaaccggaaaactggatgttgataccgctagtgcggtgatcagcggcattgcggaaggttgtctgcaaagtggctgtagtctggtgggtggcgaaacggcagaaatgccggggatgtatcacggtgaggattacgatgtcgcgggtttctgcgttggcgtggtagaaaaaagtgaaatcatcgacggctctaaagtcagcgacggcgatgtgctgattgcactcggttccagcggtccacacagcaacggctatagcctggtgcgcaaaattcttgaagtcagcggttgtgatccgcaaaccaccgaacttgatggtaagccattagccgatcatctgctggcaccgacccgcatttacgtgaagagtgtgctggagttgattgaaaaggtcgatgtgcatgccattgcgcacctgaccggcggcggcttctgggaaaacattccgcgcgtattgccagataatactcaggcagtgattgatgaatcttcctggcagtggccggaagtgttcaactggctgcaaacggcaggtaacgttgagcaccatgaaatgtatcgcaccttcaactgcggcgtcgggatgattattgccctgcctgctccggaagtggacaaagccctcgccctgctcaatgccaacggtgaaaacgcgtggaaaatcggtatcatcaaagcctctgattccgaacaacgcgtggttatcgaataatgaatattgtggtgcttatttccggcaacggaagtaatttacaggcaattattgacgcctgtaaaaccaacaaaattaaaggcaccgtacgggcagttttcagcaataaggccgacgcgttcggccttgaacgcgcccgccaggcgggtattgcaacgcatacgctcatcgccagcgcgtttgacagtcgtgaagcctatgaccgggagttgattcatgaaatcgacatgtacgcacccgatgtggtcgtgctggctggttttatgcgcattctcagcccggcgtttgtctcccactatgccgggcgtttgctgaacattcacccttctctgctgccgaaatatcccggattacacacccatcgtcaggcgctggaaaatggcgatgaagagcacggtacaagcgtgcatttcgtcaccgatgaactggacggtggcccggttattttacaggcgaaagtcccggtatttgctggtgatagcgaagatgacatcaccgcccgcgtgcaaacccaggaacacgccatttatccactggtgattagctggtttgccgatggtcgtctgaaaatgcacgaaaacgccgcgtggctggatggtcaacgtctgccgccgcagggctacgctgccgacgagtaatacccccgtaattaaagcgccagctctgccgctggcgtttttcaattcacctgtaaatcgcaagctccagcagtttttttcccccttttctggcatagttggacatctgccaatattgctcgccataatatccaggcagtgtcccgtgaataaaacggagtaaaagtggtaatgggtcaggaaaagctatacatcgaaaaagagctcagttggttaagcttcaatgaacgcgtgcttcaggaagcggcggacaaatctaacccgctgattgaaaggatgcgtttcctggggatctattccaataaccttgatgagttctataaagtccgcttcgctgaactgaagcgacgcatcattattagcgaagaacaaggctccaactctcattcccgccatttactgggcaaaattcagtcccgggtgctgaaagccgatcaggaattcgacggcctctacaacgagctattgctggagatggcgcgcaaccagatcttcctgattaatgaacgccagctctccgtcaatcaacaaaactggctgcgtcattattttaagcagtatctgcgtcagcacattacgccgattttaatcaatcctgacactgacttagtgcagttcctgaaagatgattacacctatctggcggtggaaattatccgtggcgataccatccgttacgcgctgctggagatcccaagtgataaagtgccgcgctttgtgaatttaccgccagaagcgccgcgtcgacgcaagccgatgattcttctggataacattctgcgttactgccttgatgatattttcaaaggcttctttgattatgacgcgctgaatgcctatagtatgaagatgacccgcgatgccgaatacgatttagtgcatgagatggaagccagcctgatggagttgatgtcttccagtctcaagcagcgtttaactgctgagccggtgcgttttgtttatcagcgcgatatgcccaatgcgctggttgaagtgttacgcgaaaaactgactatttcccgctacgactccatcgtccccggcggtcgttatcataattttaaagactttattaatttccccaatgtcggcaaagccaatctggtgaacaaaccactgccgcgtttacgccatatttggtttgataaagcccagttccgcaatggttttgatgccattcgcgaacgcgatgtgttgctctattatccttatcacacctttgagcatgtgctggaactgctgcgtcaggctagcttcgacccgagcgtactggcgattaaaattaacatttaccgcgtggcgaaagatagtcgcatcatcgacagcatgatccacgccgcacataacggtaagaaagtcaccgtggtggttgagttacaggcgcgtttcgacgaagaagccaacattcactgggcgaagcgcctgaccgaagcaggcgtgcacgttatcttctctgcgccggggctgaaaattcacgccaaactgttcctgattagtcgtaaagaaaacggtgaagtggtgcgttatgcacacatcgggaccgggaactttaacgaaaaaaccgcgcgtctttatactgactatagcttgctgaccgccgatgcgcgcatcaccaacgaagtacggcgggtatttaactttattgaaaacccataccgtccggtgacatttgattatttaatggtaagcccgcaaaactcccgccgcctattgtatgaaatggtggaccgcgagatcgccaacgcgcagcaagggctgcccagtggtatcaccctgaagctaaataaccttgtcgataaaggcctggttgatcgtctgtatgcggcctccagctccggcgtaccggttaatctgctggttcgcggaatgtgtagcctgatccccaatctggaaggcattagcgacaacattcgtgccatcagtattgttgaccgttaccttgaacatgaccgggtttatatttttgaaaatggcggcgataaaaaggtctacctttcttccgccgactggatgacgcgcaatattgattatcgtattgaagtggcgacgccgctgctcgatccgcgcctgaagcagcgggtactggacatcatcgacatattgttcagcgatacggtcaaagcacgttatatcgataaagaactcagtaatcgctacgttccccgcggcaatcgccgcaaagtacgggcgcagttggcgatttatgactacatcaaaagtctcgaacaacctgaataaccctatgccaatacacgataaatcccctcgtccgcaggagtttgctgcggtcgatcttggtagtaacagttttcacatggtcatagcccgtgtggtagatggtgccatgcagattattggccgcctgaaacagcgggtgcatctggcggacggcctggggccagataatatgttgagtgaagaggcaatgacgcgcggtttaaactgtctgagcctgtttgccgaacggctacaagggttttctcctgccagcgtctgtatagttggtacccatacgctgcgtcaggcgctgaacgccactgactttctgaaacgcgcggaaaaggtcattccctacccgattgaaattatttccggtaatgaagaagcccgtctgatttttatgggcgtggaacatacccaaccggaaaaaggtcgcaaactggttattgatattggcggcggatctacggaactggtgattggtgaaaatttcgaacctattctcgttgaaagccgccggatgggttgtgtcagctttgcccagctttattttcctggcggggtcatcaataaagagaattttcagcgcgctcgcatggcggcagcacaaaaactggaaactttaacctggcaattccgtattcagggctggaacgttgcaatgggcgcttccggtaccataaaagccgcccatgaagtgttaatggaaatgggcgagaaagacgggataattaccccggaacgtctggaaaaactggtaaaagaagttttacgtcaccgtaatttcgcaagcctgagtttaccgggtctttccgaagagcggaaaacagtcttcgttccgggactggcgattttatgcggtgtgtttgatgctttagccatccgtgaactgcgcctttctgacggggcgttacgcgaaggcgtactgtatgaaatggaaggacgtttccgtcatcaggatgtgcgtagtcgcaccgccagcagcctcgccaaccagtatcacatcgacagcgaacaggcccgacgggtgctggataccactatgcaaatgtacgaacagtggcgggaacagcaaccgaagctggcgcatccgcaactggaggcgctactgcgatgggccgccatgctgcatgaggtcgggttgaatatcaaccacagcggtttgcatcgccactccgcttatattctgcaaaacagtgacttgccgggttttaatcaggaacagcagctgatgatggcgacactggtgcgctatcaccgtaaagcgattaagctcgacgatctaccgcgctttaccttgtttaagaagaaacagttcctgccactgatacagctattgcgccttggcgtattactcaacaatcaacgtcaggcaaccaccacaccgccaacattgacgctgattactgatgacagtcactggacactgcgtttcccgcatgactggtttagtcagaatgcgctggtactgcttgatctggaaaaggagcaagaatactgggaaggcgtggctggctggcggttgaaaattgaagaagaaagtacaccagaaatcgccgcttaatactttgcgggccgacgagaaatgtcggcccgcattattcaggcactttcgcgaatgggttcgatttcattcagcgtatcaattaacggctgcggcttaccaataagataaccctgcatataatcgatccccaaagagagcaccgcctcgcggatctcttcgttttcaacgtactctgccactaccagcattttcttcattcgcgccaggtggcaaatgcttgccactatctgataatccagactattactcacaatattgcggataaaactgccgtcaattttaagcagatcggcattcacatttttaagccgcgcatagctggcgtagccggtgccgaaatcatcaatcgcaatctggcagcctaattcctgaagatgctgcaaggtgatttgcgcctgcttaacattggtcagagcattactttcggtgacttcaaaaataagttgccacgcttcaatctgatatttagccagcaactgactgacttcaacaggaaaacgagcctgacatacgctggttggagacagattaatagcaaaacggtgagcgggcatcttcgctctgttttcagccataaattgcagcgtatgctcaatgacccacatgtcgatactgctgcttaaaccaaattcgtgcgcgaccggcaagaagctatcggggctgatcagttcatcattctcacctttcatgcgcagaagaatttcatggtaaacatcaccacgcataccggtaatcggctgggccatcaggaaaaaatggttgtgttccagcgcctgctgtagtcgattcatcatcgcgactttatctttcaattcgcgttgcaaatacattgccccgcgacgctgcatattttccggggcgttggtcacgatggaaagttcggcgaccgtatttagctctcccagcagcaggtagatatgattcactgggctgcgcacatagcagtaactgacgccaatctgcggttgcatcggcatgccatcccaaaagaaacgaaattgcttgagatggctatccagtgcggtaatgcgctcctggtggctttctgtattcagtcgcagcgcgagatcgttaccgctaagctgataaacatcttcacccggttccagcaagggactcagccagtgagaaagtttttgcttgtattgaatccgcagcatgatgccatagttcttaaccagcatttccatgccagggatgcgtaaataacaaagcgcagaccagggggcatcacgcaacgcgcgattcagggcgcgaacatttggcagatgaaccaccgggtccacatacgcaagccgctgaatgcgtctgactaccgctctctgacgggttgccagtacagccatataattgacaataaaagagaataccagataactggaggaggttatggtcagctgcgtggtatagccaggataaatgggaatgtaattttgatagctgtggatgctgatcatcaacacgaccgcccagagcaggctaatcagcttataaccatagcgcatcgctccccacatcatcaggggcagcaataaactcaaggtataattggtgctaaaaattgtgcttttttcatttaacggcatgcataacagcaacaataaagcacctaatgccagtagccagagcgcgaactcttttttggtgactttggcatcaacctgctgttttaattggctataatagctacgtaaataaaatggatttcgcactacccgaatgatgaagtagcacagcgggacaccgatcagattacccaccagtaaggcctgataattgattaaagtcccgaggttaaaaggcatgacaccgaccagattttctctgctcgccagtaatcctacaaatgcagcaaactggaaaagtatcagaaacagcgttgcaggaaacacaatctgccagaatatacgctgggaaattaaacgggtatcaccatgactaacgttgttacgccggggagtaaagaccctgtaaccgccccaacagagaatgataatgataataaaattagccgttaaacttagcgtttcgtaaaaacccagctctgcatatttgcggacaaaaatccctaaggcgatccctggcaatgccgcccagctgaaaaacatcatcatgctgatcatcagtgccagaggcagataaaagagaaaaacctcaccggaagaaatatgcgcgaaagtattaatgtgggcgaaaatgggcaagattaaagaaggcaggaacagcggaagcccccaccatttatcacgtatttttatataagttgcattcagtttcatagatgctcagcagaatcccccacatcctgaaggaggtgtattcagacaggcatcccacctgacttcgaatgatgattattcatcactatagagagcattgattctaagtgtcatatgaaagtaccaattgatatatatcaaacaaaataaccctgattaatgaattattacgtttatcatgttaattcatcattattacatcatcattgtaaataattaaattaacttccataacattaaaatatgtatccactgacgcttttttacataacgaagaattgaccattttgtcctgttgtgccttaatgtaagtaccgtccacagcgtgggacatacttcaaggaaccttttgtgagtcaggcaaccagtatgcgaaaacgacaccgatttaacagtcgcatgacccgtatcgtactgctcatcagctttatcttcttctttggccgttttatctacagctccgtcggtgcctggcagcaccatcagagcaaaaaagaagctcagcaatccacactctccgtcgaaagtccggtacaacgttaacggttaccttctccactttcacagaacataacggcacttcgctgtcggatgcttttgctgtttgggattatcaaagcggcagatattctttcatcttaaattttacgtctttatcctgactgatgtttatcctgtttggctgcgaaataaatataaaattaatatatatgttgtaatgatatatttttataaattattccctgcgtgaattttaataaatttaatctatccctttatacgcaatacatttactttcctcttttgatgatcttaaatgtcttatttttcgtaatgtgtataacaaggaatagtgatgaaatttaaaaaatgtcttctgcctgtggcaatgttagcgagtttcactctggcaggatgccagagtaatgctgacgatcatgctgccgatgtttatcaaaccgatcaactgaataccaaacaagaaactaaaaccgttaatattatttccattcttcccgcaaaagttgccgtagacaactcccaaaataaacggaacgcacaagccttcggcgcgcttattggcgcagtcgctggcggtgttatcggccacaacgtcgggtctggcagcaattccggaacgacggcaggtgcagttggcggcggagctgtaggcgcggcagcgggttctatggtgaatgataaaaccttagtggaaggtgtttctttaacctataaggaaggcaccaaagtgtatacctctacccaggtgggtaaagagtgccagtttacgacaggtttagccgttgttattaccacgacgtataacgaaacgcgtattcagccaaataccaaatgtcctgaaaagagctaataatcaggaggagtcatgaagaaagtttttctttgcgccatcttagcctccttaagctatccggctatcgccagtagtttgcaggatcaactctctgctgtcgcagaagcggaacagcaaggtaaaaatgaagagcaaaggcagcatgacgaatgggtcgcggagcgcaacagggaaatccagcaagagaagcaacgtcgcgcaaatgcccaggccgccgctaacaaaagagcggcaacggcagcggcaaataagaaagctcgtcaggataaactggacgccgaagcctctgcggacaaaaaacgcgatcaaagttatgaagatgagctacgcagcttagagattcagaaacaaaaactggcgctggcgaaagaagaagcccgcgttaagcgagaaaacgaatttatcgatcaggaactgaagcacaaagctgcgcaaaccgatgtggtgcaatctgaagctgacgccaacagaaatatgactgaaggcggtcgcgatctgatgaaaagcgtgggcaaagcagaagagaacaaaagcgacagctggtttaattaatcgatgttagtaacttcaatcctataattcttgaagataaaaaaccctctgtagtaacagagggttttgttcattcatagtgcagggtcaaatcattcccactcaatggtagctggcggcttgccgctgatgtcatacaccacgcgggaaataccgttcacttcattgataatgcggttggaaacgcgaccgaggaaatcgtacggcagatgcgcccagtgtgcggtcataaagtcgatggtttcgacagcacgcagagagacaacccagtcatacttacgaccatcgcccattacgccaacggaacgtaccggcaggaacacagtgaacgcctggctgactttgtcgtacaggtccgctttacgcagttcttcaatgaagatggcgtcagcacggcgcagcaggtcacagtactctttcttcacttcacccagaacacgaacgccaaggcctggtcccgggaacgggtgacggtacagcatgtcgtacggcaggcccagctccagaccaatcttacgcacttcgtctttgaacagctctttcagcggttcaaccaggcccatcttcatctctttcggcaggccgcccacgttgtggtgagatttgatgacgtgtgctttaccggttgcagacgccgcagattcgataacgtcagggtagatggtgccctgcgccagccacttcacgtcttccagtttcagcgcttcttcatcgaatacttcaacgaaaacgcgaccgatgattttacgttttgcttccggatcgttttcgccagccagcgcactcaggaagcgatcttctgccggtacgtgaacaatgttaagaccaaagtgatcgccaaacatatccagaacctgctctgcttcgttgaggcgcagcaggccgttgtcgacgaatacgcaagtcaggtttttaccgatagcgcggtgcagcagcattgcggttacggaggaatccacaccaccagagaggccgaggatgactttatcgtcgcctacctgctcgcggatgcgagctacagcatcgtcgataattttcgctggcgtccacagggcttcacactggcagatatcacgcacaaaacgctccagcatgcgcataccctggcgggtatgagtcacttccgggtggaactgtacgccatagaagcgtttttcttcgttagccataatggcaaacgggcagctttcggtgctggctacggtgatgaagtcggacggaatagcggtaactttatcgccgtggctcatccagacatcgagcagcggtttaccgtctgcggtcagcgcatcttcgataccgcgaaccagtgcgctgtcgtttacgacttcaacctgcgcgtagccaaattcacgttcgttagaggcttcaacgtgaccgcccaactgcattgccatggtctgcatgccatagcaaacgccgaataccggtacgcctgcttcaaagacatactgcggcgcacgcggactgttttcttcagtagtactttccgggccgccggaaagaataatgccgcttggattgaagtcacgaatttgtgcttctgtcacatcccacgcccacagttcgcagtaaacacccagctcacgcacgcggcgcgcaaccagttgagtgtactgagaaccgaagtccagaatgaggatgcgatgcttatgaatgttttccgtcattgacgcttattccgaggcaagtgaaacagataatataaatcgcccgacatgaagtcgggcgaagagaatcaggagcccagacggtagttcggggactctttagtaatggtcacgtcgtgaacgtggctttcctgaatgcccgcaccgctgatacgtacaaactccgctttagtacgcagttcgtcgatagtaccacagccggtcagacccatacaggagcgcaggccgcccatctgctggtgaatgatctctttcaggcgacctttataggctacgcgaccttcgataccttccggcaccagtttgtcggcagcgttatcgctctggaaataacggtcagaggaacctttggacatcgcgcccagggaacccataccacggtaagatttgtaagaacggccctggtagagttcgatttcacccggagattcttcagtacccgccagcatggaacctaccatcaccgcgcttgcgccagcggcgatagctttggcgatgtcgccggagaagcgaataccgccatcagcgataaccggaataccggtgccttccagggcttctactgcgtcagcaacagcggtaatctgcggaacaccgacgccagtcacgatacgagttgtacagatagagccagggccaatgccgactttaaccgcactgcaaccagcttctgccagagcgcgtgcacctgcagctgttgccacgttgccgccgataatttgcagatccggatatttagcacgggtttcacggatacgttgcagtacaccttcactgtgaccgtgggaggagtcgatcagcagaacgtcaacgcctgcggcaaccagcgcgtcaacacgctcttcgttacccgcacctgcgccaaccgctgcaccaacacgcagacggccttgctcgtctttacaggcgttcggtttacgttccgctttctggaagtctttcacggtgatcatgccgatcaggtggaattcgtcatcaaccaccagcgctttttcaacgcgtttttcgtgcatttttgccagcaccacttcacgggcttcaccttcacgcacggtgaccagacgctctttcggcgtcatgtaaacgctaaccggctggttcaggtcggtaacaaaacgcacgtcacgaccggtgataatacccaccagttcgttttcttcggtaacgaccggatagcccgcaaaaccgttacgctcggtcagttctttcacttcgcgcagcgtcgtggttggcagaacagtctgcggatcagtcaccacaccagattcgtgttttttcacacggcgaacttcttctgcctggcgttcaatggacatgtttttgtggataaagccgataccgccttcctgagccagagcaatagccaggcgcgcttccgttacggtatccattgctgcggaaagcatagggatattcagacgaatagttttcgtcagctgggtgctgaggtcagcagtattcggcagaacggtagagtgagcaggaacgaggagaacgtcgtcaaacgtcagagcttctttagcgatacgtagcatgggcaatatctcgaccagagtggttaataaatattgccgcggcattatacagagcgtaaccgattgcatctacccctttttgcaaaaaatgcttgctatccccgaagggcgggttactatcgactgaataacctgctgatttagaatttgatctcgctcacatgttaccttctcaatcccctgcaatttttaccgttagtcgcctgaatcaaacggttcgtctgctgcttgagcatgagatgggacaggtttggatcagcggcgaaatttctaatttcacgcaaccagcttccggtcactggtactttacactcaaagacgacaccgcccaggtacgctgcgcgatgttccgcaacagcaaccgccgggtgaccttccgcccacagcatgggcaacaagttttagttcgcgccaatattacgctctacgagccgcgcggcgactaccagataatcgttgagagtatgcagccggccggtgaagggctgctgcaacagaagtacgaacagctcaaagcgaagttgcaggctgaaggtttgttcgatcagcaatacaaaaaaccacttccctcccctgcgcattgcgttggtgtgatcaccagtaaaaccggtgctgcgctacatgatattttgcatgtgttaaaacgtcgcgatccttctctgccggtgatcatctaccctgccgccgttcagggcgatgacgcgccggggcaaattgttcgcgccattgaactggcgaatcagcgcaatgagtgcgacgtattgatcgtcgggcgcggcggcggtagcctggaagatttatggagttttaacgacgaacgcgtagcgcgggcgatttttaccagccgcattccggttgtcagcgccgtcgggcatgagacggatgtgaccattgccgattttgttgccgatctgcgtgcgccaacgccgtctgccgccgctgaagtagtgagccgtaatcagcaagagttactgcgccaggtgcaaagcacccgtcaacggctggagatggcgatggattattatctcgccaaccgcacacgtcgctttacgcaaattcatcaccgattacagcaacagcatccgcagctccggctggcacgccagcaaaccatgcttgagcgcctgcaaaagcgaatgagctttgcgctggaaaatcaacttaagcgtaccgggcaacagcagcagcggttaacacagcggctgaatcagcaaaatccacagccgaagattcatcgcgcgcaaacgcgcattcagcaactggaatatcgtttagcagaaaccctgcgcgcacagcttagcgccacgcgtgaacgtttcggtaatgcagtaacgcacctcgaagccgtaagcccactgagtacgctggcgcgtggatacagcgttactactgctactgacggcaatgtactgaaaaaagtgaagcaagttaaagcgggtgaaatgctaaccacacgtctggaagacggctggatagaaagtgaagtaaaaaacatccagccagtaaaaaaaagccgtaaaaaggtgcattaagccagcacgaattcaacgcgttttttgcttatcaagccatgcccgtgctgacagaagtaatctactgcaccacaggcttttaacacctgcaacggttgatggcagtctggacaaagagctttcatttcaataaattccccgcaggatcggcaacgcgcatggccgttatcctgatcaagcacatgctgacattgtggacaatgcagttccatatgaattcctccggtagccattccctctacattcatagagggaatggcagataaaatacttacggataattatttatttttcttgatgtgcttcatcagacgcttacgtttacgcatctgggttggcgtcagggtgttacgcttattcgcatacgggttttccccttctttgaactgaatacgaatcgggcttcccattacgtccaggcttttgcggaagtagttcatcaagtagcgcttgtaggaatcaggcaggtctttcacctgattaccgtgaatcaccacaatcggcgggttataaccaccggcgtgggcatatttcagcttcacacgacgaccgcgtaccagcggcggttggtgatcttcaacagccatcgtcatgatgcgcgtcagcatagaggtccccacacgacgggtggagctgtcatacgcttcacgtacactttcaaacaagttaccaacaccactgccgtgcaaggcagagataaagtgcacacgagcaaaatcgataaagcccagacggaagtccagcgtttctttcacctgctctttcacttcctgactcaggccatcccacttattcaccacaatgacaagactgcgcccactattgagaataaagcccagcaggctgagatcctgatcggaaataccttcgcgcgcatcaatcactaacatcaccacgttggcgtcttcaatggcctgcaacgttttgattacggagaatttctctacagcatcggtgattttgccgcgtttacgtacgccagcggtgtcaatgagcacatactcacgtccatcgcgttccattgggatgtagatgctgtcacgcgtcgtgccaggcatgtcgtaaacaacaacgcgctcttcaccaagaatacggttagtgagtgtagacttacctacgttcggacgacccacaatcgccagtttgatcggcagactttgcgggtcgaagtcgtcttcctcttcttcttcgccgttctcttccgcttcaaattgcgcccagtattcagcgtcttcgtcgacttcctcttgcggtgcgagatcttccatccacggcagcagcacatgctccagcagacttaatacgccacgaccgtgagacgcggcgatcgggtagatttcacctaaaccaaggctgtagaaatcaaccactgcctgatcgggatccagaccgtcagttttgtttgccaccaggaaggtcggtttttcacgggagcgcagatgtttggcaatcgcttcatctgccggcatcaggcccgcgcgcgcatccaccataaacagtacgacgtccgcttcttcaatcgccagcaggctttgttccgccatgcgggtttctacaccgtcttctgtgccatcaatcccgccggtatcaatacagataaactcacggccttcaatttccgcacgaccgtacttacggtcacgagtcagacccgggaaatccgcaaccagcgcatctcgggtgcgagttagacggttaaataacgtggattttcctacgttagggcgcccgacaagcgcgaccacaggtaccatgtttaaagcctcatttttataaatcatcagacaacgcacgctatattcgcgtcgttgttaaaaacaggaaaacggcccctgtccaggagccgttttcaaagtgaacgacagagacgattaacgtgtaatagagtacacggttccgtcttttgcctggatcagcagtttgccgtcagcggcaaccggttcagtctggaaaccggaactatcaactttttgctgggcaacgaaacgaccatcttcgacgttaatccagtgcagataaccttcactgtcaccgaccaccaggttgccattatacagcaccggagaagtcagcaggcgatgcagcagatcgctttgtgtccacagcgtaacgccgccatcaatggtcaacgccatcacccggtcattttgatcgaccagatagatgcgattgccgtcgacgatgaaatcattcacgctacccagttcgcgtttccacataatctgaccactgcgcagatcaagcgccgtcaggttaccattataggccagcgcgaaaacaacgccgttaacaacgacgggagtcgtgtcaacatcgctcagacggtcaatttcggtagaaccggtcgcctgggaaatacgctgctgccaaatcatctggccctgttccatcagcactgcgctgacgcgaccattatcgccccccacgacggccgcaccaaaagccgttgtcggcgcagactcgccacgcaaagagaggctaggcatatcgaggttaactgtccatttgacagcgccgtcagcttcgttcagcgcttgtaactgaccgttactggtgtggattaacaccagaccgtcgctgaccaccgggcggctaagtgcttcacccgcgactttagtttgccatgccacagtaccatcgctggtattcagcgcgtaaacctgcgccttttcgctgccaatgtagacatgcccaccagacacggtcacaccgccagaaagtaatgcaggctctttagagaaccagccatctttctcggccaggctgacagaccagatttctttgccatcatccgcattcagcgcttttactaaaccagcgcggtccgctgcatagacaacgttgtccgccagtgccggatgaagattggaatagaagttgccaatgccgctaccaacggaagtgctccacgccgtggtcggcgtaaactggttttcaacggttggcaatggggacatctttaccacatcttcttcgctgttaaacaggctacagccgcttaaaagggtaacggaaagcagtcctggcagcagtaatttacgcaattgcatcgggtccctctcagatggacaaattattaattttcatctgcatcatttcgctcagtgccggagtaacatcgcttttcacgcctgcttcccatgcactacgcgcaccttgcttatcacctttgctcagcaatgcttcaccacgcaggtcggcaacaatggcagcccacccttcacctttgatggtatcaagggttttcagcgcggcatcagcctgcttgagctgtacctgaacgcgagcaagacgcagatttatcacggctttgagattttcatcgctcgtgtctgccagcccctgttgtaactgggcggcagctttctctagttcatttttgtcaacaaattgctgcgcaagttccaaagaagccagcgcaccataagtatttttattttcagcagcaaatttttccgccgccgggatgctatccggtttgccttcgctcactgcggtaaccgcattttgataggcaagagaagcggagcgtgcagaatcaacctgatggctgttccagtagcgccagccaatcagtgcgccaacgcccaaaatcaccccaacagccagtgctttgccattttcagcaaaaaagcgtttaaccgcttctacctggtcgttttcgttctcgtaaatttccacgctgtccttctccttccttaacccagtaacgtgcgcaaatgcgcggctacgctatcctgcgcaactgccgtttgctcaccagagcgcaaatccttcactactgctgtgccgttagccacttcagactcacccagcaccacagcaacgcgggcaccccatttatcagcacgggcaaactgtttcttaaagttgccgccgccgtggttggtcatcaatttcacgcccggtaattcatcacgcagacgctcagctaatgccatagccgcagattgtgtatcagcaccactagccaccaggtatatatcgacaacaggatcggctttaaattccggattaacggcctgtactaacaatacaagacgttcgaggcccatagcaaaaccgacagccggtgttgcacgaccgcccagttgttccacaagaccgtcataacgaccgcctgcacacacggtgccctgggagccgagactgttagtcacccactcgaaaacggtacggttgtagtaatccagaccacgcaccagacgctggtttacggtgtaagcgatccccgcgctctccagcagtttgcacagaccggcaaaatgctcacgagattcctcgtccagatagtcacctaatgccggagcgtcgttgagaagcgcctgcacttccggatttttactatccagcacgcgcagcgggttagtgtacatgcggcgtttgcagtcttcgtccagcttttctttatgctgctcaaggaatgccaccagcgcatcgcggtaattggcgcgtgcttccaggctaccgatagagttcagctcaagagttacgtgctcggaaatacccagcgcgcgccaccagcgggcagtgagcataatcagttcagcgtcgatatccggaccttgcagaccgaaaacttcgcagcccaactgatggaactgacgataacgccctttctgcggacgctcgtgacggaacatcggcccgatataccacagacgctgttcctgattgtacagaagaccatgctcgatgccggcgcgtacacagcccgccgtcccttcagggcgcagagtcaggctgtcgccattgcgatcctcaaaggtgtacatctctttttcaaccacgtcggtgacttcaccaatcgcacgtttgaatagcggggtctgctctacaatcggcaagcggatttcactgtaaccgtagctgccgagcacgtttttcagtgtgccttcaatgcgctgccagatggccgtttcgccaggcaggtaatcgttcatgccgcgaatggcttgaatgttttttgccacgtttattctctttctgaatataaaaatgaaccctcaacgcttccctcaatgtttcgggagccatgcgggttcaatcatacacgggaagcgaggcgcttcccatcacgttattatttttcaacctgctgaacgtcaattcgacgcgcttcgtccagctgactggctttcgcacgaatgcgtgcttccagctggtcgatcatatcgttgttgtccagacggtctttgcgcacgccatcttcatagaggccgcttttcttgttgccgccggtgacgccgagtgtagaaaccagcgcctcacctgggccattcaccacgcagccgataatgctaacgtccatcggagtgatgatatcttccaggcgttgctccagcgcgttaaccgtaccgataacatcaaattcctgacggctacaggtcgggcaggcgatgaagttgatccctcggctacggatacgcaggcttttcaaaatatcgaaaccgactttgatctcttcgaccggatcggccgccaggcttacgcgcagcgtgtcgccgatgccttcagacagcagcagacctaaaccaatggcggattttactgccccgctgcgcgcaccaccggcttcggtgatccccagatgcaacggctgatcgatctgttttgccagcaaacgataagactcaacagcgaggaagacgtcagacgctttcacgctgactttgaactgatcgaagttcaggcgatcgagatgatcaacatgacgcatggcagattccagcaacgcctgcggcgtcggttcgccatacttttcttgcagatctttttccaggcttccggcgttaacgccaatacggatcggaatgtttttatcgcgcgcacagtcaaccaccatgcgaatacgctcttcattaccgatattgccagggttaatacgcagacaatcgacgccgtattccgctactttcagcgcaatgcgatagtcgaagtggatgtcagccaccagcggcacgttaacctgctgtttgatgagtttgaacgcttctgccgcgtccatcgtcggtacggatacacggacgatatcagcgccaacgcgttccagcgccttgatttgattgaccgttgcttcgacgtctgtcgtacgcgtattggtcatggactgtacggcgatgggagcaccatcgccaatcggcacattcccaacgtaaatacgtgtactttttctacgttgaattggagcctggttatgcatgaaaaatctcccgcgttacccgtctgttactgcgccggactttgttcggcattgagggtcagacgcgcaacctggttagttctgataaaacgactcagatcgacaggtttcccttgatactggatctgtactgcggctggcgcaccaattttcagtttgtacggtgcctggccggttaagttcaaattaccgtctttacgctgcataccgctaaacaattttttaccggtagcatcagtgacctccagccagcaatcggcagtaaagttcatcaccagcgcattcggatcagccaccggcgtggtcacgccagcctgatcggttggcaacggcgcagcaccatctggcgttgttgctgccgttggtgccggggtcgcggcggtatcaacatttgcctggctagggctaacaaccgcattctgttgcggatcaacagctggtgctggcgcagttacggcaggtgtttgcgtgttggttgcggtagtatccacagacgctggcggcgtggacgttgtagccgggtctgtagttgtgctcgtatttaatggaacactctgcccctgctcgctattactgctcagttccgcgctagattgatcggccatagtggtgatctcttcctgctgagctttgcggtcttgccaccaccaggcaccgctcaggccgataaccacaaacaacaccagccaagtgaaggtcatcagccagccgtcgcgttttttgcggcgtttaccgagggaaaaactctgcatcggcgcaacttttgcagcccgaagtggagcctgcttttccagccctggcagcagttcttcttctggaatatgtaccagacgcgcataagagcggatatatccgcgcaggaatgtactagcaagatcggcgggtgccttatcttcttcaatgtcgcgtaccgtggaaaccttcaggcaaagtcgctcggcaacggcctgctgactaagtcctagttgttcgcgagcattacgcaggcgagcgccggtagtaagtgcttcattttggtcgtgcgtggcttcagtattcattcgctgcaggtacgtttaaatgagaattgagatgccggtgaaccatcatgctcacccacaccgcgaaacatccgttaagttaaccgttatcatacagtataagaccgtctgtgtgctcgtgacaaagcccacattcactaaggctaacttactgttgcatcgttacatactgccttaaagtcagcaaaaacgcaccgttaatattgaccagacaattgcaacttaatacttcattcataaaacattacgccacggtacataaagtaaccgtggcgtaatggctatcagaccgctttaatgtcgatggcttcaccctgcatccgtttacgcagggtacgtttcgtacggtcgataacatcgcccgccaactgaccacaggcagcatcgatatcatcaccacgagttttacgcacaatagtggtgaaaccgtagctcatcagcactttactgaaacggtcgatacggctgttgctgctgcgtccatacggcgcacccgggaacgggttccacgggatcaggttgatcttacacggcgtatctttcagcagttccgccagttggtgcgcgtgttcagtgccgtcgttaacgtggtcaagcatcacgtattcaatagtgactcggccctgattggcgttggatttctccagataacggcgcaccgcagcaaggaacgtttcgatattgtactttttgttgatcggcacaatttcgtcacgaatttcgtcgttcggcgcgtgcagggaaattgccagtgcaacgtcgatcatatcgcccagtttatccagcgccggaactacaccggaagtggaaagcgtgacgcgacgtttagacaggccaaaaccgaaatcatcaagcatgatttccatcgccggaacgacgttgttcaggttgagcagcggctcgcccatgcccatcatcactacgttagtgatcggacgctgaccggtgacttttgctgcgccgacgattttcgccgcacgccacacctggccgataatttcgctcacccgcaggttgcggttaaagccctgctgggcggtggaacagaatttacactccagcgcacaccccacctggctagagacgcagagcgtggcacggtcgtcttccgggatatacaccgtttcgacgcgctgatcgccaacggcgatcgcccatttaatggtgccgtcagaactacgctgttcttcaaccacttccggtgcgcggatttccgccacctctttcagtttgccgcgcaacactttgttgatgtcggtcatctcatcaaagttgtcgcagcaatagtgatacatccacttcatcacctgatcggcgcggaagggtttttcacctaaatctttaaaaaactcccgcatctgctgacggttgagatccagcaggttgatttttccatctttcgtggtgacgttttcaggtgtgactaattgttcagacatatgctattccggcctcgttattacacgttatggcccctggagggttgaaaaaagaaacgccccggtgagcggctgctcgtccgggggcgctgcattgtacaaattctggcgcacggatgccacgtttgcacgcggcatttacgaaattattaacgggtgcgcgggcacacttcgccttcgccaaagaaataagcgatttcgcgagcggcagattcgacggaatcagaaccgtgggtaccgttttcggtcaggctgtcagcgtaatcagcgcgcagagtaccagccagtgcgtttgccggattggtcgcgcccagcagatcgcggtgacgctgaacggcgttttcaccttccagcacggaaaccacgatcgggccagaggtcatgaattcaaccagaccatcaaagaacggttttccatcgtgttcagcataaaagccacgtgcctgttcaacggtcaggtgcagcattttggtgccaacaattttgaaccctgcagcttcaaagcgcgcaaagatattaccaatgacgttttttgctaccgcgttcggtttgatgatggaaaaagtacgttcaatagccatttttacctctgtaaattgttctgttgttgtctgtaccagcgtacgagatggcgcggattataatgagcaacagggccgttgactattgatgaaggtaacatttttttaaaataaaatgagttttagcaacaatcagggacaaaacagattattgcatgacaaatttcactgtcgcgatttgccccacgtcatccatcaccagcaattgataatcacctttatccgtcaaatgcagggtcacgttgcgcccgcgttcagttaacggttcgccattcagaaaccaccagcgttcacctgcccctccactactttgcaacggcaaagtcgcttccgctgcgcccggtaaacgtttaataatcgcgccatcgcgaacgcctgtcagctgcagcgggagctgggcatcgtgaccgtatggcgggcaacttgtgctggccggtggtaagcgcacagcgcgacgttcacttgcgggcagccagggttccagcggtagcggccagacatttatcatttcttgtcgcgcttgcgggcaatcagcggcaacacgtttgccattttcatccagccagatggggaaacgaatgccattaatgccttcctgctccggcagtaatagagttggcggctgactcccgtccagcagccaggttgccaggcggcggcgacagttaccgtcaccttccggcaaagactgtccgcccggccagcagataacgccacgagtgacactgttcgggcgcgggtcttccggcagattcgcactgcggctcagtaagatattattgacctgattcaacaatggtacggcactggcaaagccaaactgaccaacaacgggcgtgccgtccggtctgccagtccagatcccaatgacatagcgagcgttaaccccaatcgcccaggcgtcacgatagccatagctggtgcccgttttccatgccagtggggcgacgcgcggcaaggcactatccggcaagggttgcgcttcatcagccataatccggcgaatgatccacgccgccccgctgctcattaaaggccgttcaagcagcggatcgtcaggctgtaagcgcaatttgcctgccttgccgtggcgagcaaacgcggtatacgctgccgccatatcttccagttttgcaccagcgccgccgagaatgagactaagattcggcgcagcaccgttgggcaaatataacggcaatccaacattgcgtaactttgccgcaaaccgtttcggtccataggcttccagcacctgcacagcaggtaagttcaggctgcgcaccagcgcctcgctcatgctgatcgggccatgaaaaccgctatcaaagttacctggtcgataatcaccggtgcgccgggggacgtcttgcagcagacttgccgggtggatcaagccttcatccagcgccagaccataaacaaacggtttgagcacacttcctgggcttcggatgctattgaccatatcaacatgaccaaagcgactatcatcgttgagatcaacgcttcccacccagccgcgaacacgcatatcggtatgatcaaccacgatcatcgccagactgctgcgcggtggcaaccgccctttccagttttgcgccagttcttccagacgtcgttgaagaccggcatccaacgtagtagtgattttgtcgcttttgcttttaccgagcatcatgcggctaaacagcggtgccagttgcggcatttgtcggggggccagccagatgggttcttccctactctcttttacctgctcacgggaccacacaccttgcacggccatccgttcgagcactttattacgcgcggcttcggcacgctccggccaacgatccgggcgaagacggctgggcgcttgcggcaaaaccgccagcattgccgcctcggaatagcttaaattcgcagggctttttccgagataagcccaacttgccgcaccgatcccctgcaacgtaccgccaaacggagcgcggttaagatacaaggtcagaatttcacgcttagacagatgccattccagttgcaacgcgcgccagagctggcgaattttgccgccaaatgttttggggtgaggatcaagcagacgagcaacctgcatagtgagcgtgctgccaccggaaataacccgtccgctagtgagatcttgccatgctgcgcgcgccacgctgaatggattcacccccggatgcttccagaaccagcgatcttcataattgatcagcgcttcaaggtaacgtggagaaacatcttcgattgttaccggataacgccagatgccgtcagcatcggcgaagcgccagagcggcgtaccatcctgcgccacgaccactcgtgcgggattgacttcatgcagcggtagaggccagagtttatctgctccccacgctgcaagaaaaaggagaaagggcgcggctgccaacgttatccagcagccgcgtttggttaacaagcgaggcatttacggtctgacaatcagcagatcttcagccgcgccggtcgcccgccattggggaacatacatactttccaccatcggttgcggtacctgatacgttcccggcgtcaccgcccgcgccagatacaccagcgttaccggttggtattcatcaacggcaaccgccgccacaaagcgatcgtcacggaactcaatgtgcttaatgctcgcctgctgcatctggttcagtaagttctgcacttcgccaccactttgctccaggctggcgctaccgttcgccagattctggttttccagttccagacccgcaggcagcagatccacgactaacgcatccggcacgctgttactggcttttacctgcaaccacaccagcaccagatcgccgctacgtaagctgtccaggcttttgctcttaccatcagtaccaagaatatgacgctcgatttgcagcacattgttcgccggtaaaggtgcggattgcggataaccgctggcatccatacgcaaccataacggctgatcgccactgttgctcacctgcaaggtgacaagttgatcgctattcagattgctgttttgcgctttctcgcctgtcagctgctcagcactgaaagaggtttgcgcctgccatttaccgggtaaatcctgaatcgtacgggcagccaggaacaacgcgttactttcctgcgtgcttagccagcgttcaccaaacgcctgctggctaagtgtgttcagcaaagtgtactgctcatcgggtagcagtttattttcttccagcaaggagagcattaacgcgttgtcgcgcagactactaccgtaatcacccagccatatccgctcatcactattacgcggcgttttcagcgccagcgcaatcgcttcttcaccacgcgtcgcatcacccatggttttcagcgcaacgccaagttgcagcagcggtaaaccagaagcggcatctgcacgatgctcccagatttcacgcagcgcacccagcggagccttttgctgacgggccaacaccagcgcagcgtaagactgtacggcgaatttactggctttgagattatccgcgtacgggatgctcatcatgcccggatcttgtaaatagcgcagcagacgctcattaccccggttaatggcgtctgtcggcacgctgtaaccctgttcgcctgcgcggaccaggaaatccatcacgtaagccgtcagccagtactcttcgtcaccgtttttatcccacagcgcaaagccgccgttatcacgttgcatttgcagcaaacgggaaatgccgatatcgacgcttgcacggcgtttctcatcactgtcgcctttgatgcccaacgcctgcagttgggctgcgttggtataaagactcggaaacaggccgctggcggtttgctcaagacagccgtacggatacgcttttaactctttgatataacgtgcgatgttcagcggtggtttgccgctcaacaacaattgcccttccagcgtaacagggctgaagttttgcaatccatccgccggaatcgcccatgtctcaccaggctgtaacgccgtaccgtaattaaccgtttgtgccgggaacgccggacggacgccgattttccactgcttatgctgatcggcaacggtttcacccggtaacgctaacccgctaatggtggcctgaatttctccatcgccataacccggcaatgctcgcaccgggataaacagcgtagtacgcacacctggcgctaattcaacggctgcgggactatcgctgaccagttcaagcaaaccactggcggtcagggcaacgttcagtttttgcggtttatcggtaagattagtgatatccagcgtcagacggctggtatcgccactcgccataaagcgcggcatgttcagttcagcaatcaccggtgcggcaactatcactttactttcgttgctaccgaagtcatctgccgtccaggcttgcgccatgacgcgcaattcaccgttaaaatcgccaatcggcagtgtaacgctgccttcgccctgttcgttgagcgttaccggcagcgcctgctgcacgacaatattgacgtgattgaccggcggtttaccaccacgtttcagctcatcaccatcgccaccgaaacgcagagctgccagacgcccctgaccttcaataacctgaccgtaaatatcgtaaatgtctgcgccatagcgtttctgaccaaagaacgcctgccacggatctggcgtgacgtagtcagtaatattcagcacaccactatcaacggcagacaccagcacattcacctgtttaggcttctcgccatttttagtgctggctttaattttcacggttaatggttgattgggacgcatttttgctggtgtttccagcgccagatcgaggcgacggttttcatcgccaagcggcagatgcaacacaccaaccgcgcgttttggcgtcgcggagcgagatttatcgccaggacgtaccaccagcgtacttaaatacagatcatgacgattccaggttttatcgaccggaatcgtcagatccagcccttgagcccgaacatcaatctcttgccaccacagcggcccttcactggactcgaccatcgcataacctttacccgccgttggcgcggcgatatgcaacttaatggtgtcgccagggcgataactggctttatccagtttcagcgtgacacggtcgggtcgcactgcgccgctaccgtcgctgttgtcctgccagctatagccagcccagaaacgaacactactgaccgcttcattcggcgctttgacttccagacgataagcgccccactctaccggaaaactgaccttgccggtttcgtccgctttcagatccagagtttgttcattttcgatcagatctttttgatcaaactgactctgccagccttcatcttcactccagttccagtagtaatcgcggcgttcgcgaatcaggcgcacctgcaagccgctcacggcttttttcacgccttgcgcatcgctataaacgatgtcaaaagcggcgttactgccttcatcaacaatgggctgtttcaccgtgctgtcagtacgataatcgtaaacgcttttgctggcgaactgcggacggatccccggcaatgcatcggcaggccagatagcctgctcagcgcggcgcgtcaccgggcgaccgccgctttccagcaaactaccctggaaaataacctgtaatggggaatgcgtttccttccactggctttctgtagaaacttcgccgcgccctttatcatccagcgtcaactgaacttcatccagcgtgcgggaaagattttcggcagctatatcgccgaattcaaaaccaggtaaggcactcacagcttcacgcagtgggcgcaggaaaagttgcccttgcaaagtattaccattagcaggtgcaccatacaggtagtaccccaccacggagaatttcacttcatctttcggcgttagcggggttttctcaccggtcagattcagcgccatgcgctctggcataaaatcttcgacgtggaaatcccacatccgatactgattatcgcccgtgttagcgcgaatatgccacataccggttgccgcattgctatcgagtggccaggtaaagtggtagaggccattctccggctgactaacgacgctcctgagtacctgcccatcgggtttaatcacgtctaacttgatgggttgattgggcaacgctttaccgtctgcatcacgcagcaaaccattgaggattaccgtttcacctgggcgataaagatcgcgtgggccaaacatgaaaaactgtttgctatagcctggcgcgccagcaatgttaaattctgctaagtccagcgccggaagttttaaatcgagtagcgttgtctgaccgtctttacgcgccaacagtaatgccgcgtttttatcattttccagctgcacatgcccctgagcgtcactggttgcctgagtcagagtctgccctttctcatttaataaagagacttcaattccttgctgggccgcgccgttttccagactttgggtaaagatatccagacgattgtgataacggtgagcactaacgccgatatcacttaacgtaaacagcgtcgcgggattactgtaatcgtaacgtccagcctgattcatcacagccagatacacgcccgcctgctgaagcggtttgatatcgcccagcggcagcaataatttttcacgggtgttacgcgcaggattgagatcaaaccgtccggtgtagaccagatccgccatctgcagcagtttgtcactctgccagttcgccaggctattgcggtattcccattggctaatgaatgctggcagagattctggcttaacgcggaagaagttaacatcgacattattaacgttgagcgccattaccggcagcccttcaacgactttgccaggcagcaggctaccacggctggcaaaaccgacgctgggttggatgtcgcgggtagttatagttttttcgtaatctttactgaaggttgcgttgttgagtgctttgacctccttgccaatagtaacgatcaaatcacgtttcggttcgaggtggcgtaaacgtaactctttaagattatcactcagctcccaggcaccatccactttgccgctttttttatcgacgacatgaataacgcgactgaaatcctgatccgggtcgagagggatggagaacgtcagcaccagcgtggctgcaccatcaagttggacttcagagagatccagcaatgtcagcaccttaccggcactctgttgggccagtttttgtctctccggcacggagagttttgcactactcgcgttttcactagaggccgctttagtaacttcagaaggcgcatcttttttcaccgctgttggcgcgttatcgttgttgtcgcaccctgccagcgccagcattagcatgcaggcggctacgcgtaactttttcatttttcatccctgccacaatggcccgttagcaacgtcgaataattattatgcgtgagaatttacgttatgtaattcagtatcacgcccatacaatccgaattttagtgagaattgtggctcagacagccaaatcagcctcttttgcttgtcgcttttcactaaacatccgacaatttagcctaaccccggcaaaaatggagatgcctatgtccacgacatggtttgtaggagccgactggctcgccgaacatattgatgacccggaaattcagattatcgatgcccgcatggcgagccctggacaggaggatcgtaacgttgctcaggagtatctgaatggacatattcccggcgcagtgttttttgatatcgaagcgctttctgatcacacttccccgcttccgcacatgctgccgcgcccggaaacgttcgccgtggcgatgcgtgaattaggcgttaaccaggataagcacctgattgtctatgacgaaggtaatcttttcagtgccccacgagcatggtggatgctgcgcacctttggtgtagagaaagtgagcattctggggggtggacttgcaggctggcagcgcgatgatctgctgttagaagaaggtgcagtagagctgccggaaggagagtttaacgccgcgtttaatcctgaagccgtggtgaaagtaaccgatgtattattggcaagccatgaaaatacggcgcaaattattgatgcccgcccggctgcacgttttaacgcagaagttgatgaacctcgcccaggtttacgtcgcggacatattcccggagcactgaatgttccgtggacggaactggtgcgcgaaggcgaactaaaaacgaccgatgaactggatgcgatattttttggtcgcggcgtcagctacgacaaaccaattatcgtcagctgcggctctggtgtaacggcagccgtggttttgttagcactcgcgacgctggatgtgccaaacgtgaaactgtacgacggcgcatggagtgaatggggcgcgcgggcagatttaccggttgagccagtgaaataagtattttacaggcaataaaaaaccgccgaatttggcggttttttattgctagtctggttcgcggcctttccagcaggttgacttgtgttacatgagcaacgcaggtgcttcacagcaaaacaatactcaccagtaactctctttttgtcaagcaaaagagagtaattattgtttatttagcgtattatcgacaccggccctttccgccgtgttcggtaataaaataacctggcttattagtccgaattcagacaaatataaataaatcctgctcaaaattaaaaattctaaccggtaaaagatattacttaaacatgtaaattcactttcctttaaaaaacaaaaaaccgccaaaatcaggcggttttttgttgctggtccggttcgcggcctttccagcaggttgtattaccgtagtaatgcaagcgcgtctcagcggagacaatactcgccagtaactctctttttgtcaagcaaaagagagttattattgttctgttagtgtattatccactgcggccctttccgccgtctcgcaaacgggcgctggctttaggaaaggatgttccgtggccgtaaatgcaggtgtttcacagcgcttgctatcgcggcaatatcgccagtggtgctgtcgtgatgcggtcttcgcatggaccgcacaatgaagatacggtgcttttgtatcgtacttattgtttctggtgcgctgttaaccgaggtaaataataaccggagtctctccggcgacaatttactggtggttaacaaccttcagagcagcaagtaagcccgaatgccgccctttgggcggcatattttagattatccgattctgtttaaagtcacgcaaaaaaccaccccagcgacgttcatagaatggcgcaatatgttcggtaataaagtggctaattcctttttccccttttttcacctgacaaatatcgattggttcatcgccaggtaatgtatcggtcgctacacttcccgtcgcctgaataatttcttcgatatcaccatcggcttcaatgccaataagtaaattaggctgtgcctcttcgttctctttaatactacaaataaaagcacgcttcaccggcttaatggttttaaataaggtggtgagactatcaatcatttgtgctggcggctctgcgacttcgcttaatatcaggctttcaccgccttccaggatttcctggctgctcagcggatttccctcttcaccaatcaacaaactgatttcacgcggcataaattctttaccggttggcagtttggcattaaggaagagcgtttcgccaagtgtcatctcaaacagcgtgcgaacgggcattacgacaaatgcctgttcgtcttcaaccgcctgttgaagtgcttctaagctggtgaaaaaaggaatgacgctggtgccgtcttctttttcccagtgctgtaaatcaagcgcgctatcttcaaccacagcctcgccctgcgccgccgtaccaggcacccagacggtggattccagtagagtacggaaaaaggccgggcggtgcgccggttcagttgctgctttttccagcaggtcttcaagttcgttttttgtttcggacataagaaccacaattcattcaacgttcggggcgcaaatgcctgatgcgctacgcttatcaggcctacaagggattcgcaatttgttgaatttgcagaatttgtaggccggataaggcgtttacgccgcatccggcatattagtttacgccgttaacagattagctatcgtgcgcacaccaagtcccgtagcgcccgcagaccactgttcaaccggcgctttacggtaagtcgcgctgcagtcgatatgcagccagccttgctgatagttctcaacaaagtggctcaggaagcccgccgccgtgctcgcgcctgccggatacgccgcgcttccggtattgttcagttcggcaaagttagacggcagctggctgcggtggaactccgccagcggcagacgccagaacggttcgttctcctgcgcggcactcgccagcaagcgaccggccagcgcatcgtcaaaactgaacagcgcgtgataatcattacccagcgcagttttcgccgccccggtgagggtcgccgcatcaatgatcatttccggtttctgcgcactggcatcaatcagaccatcggcaagcaccagacgcccttcggcatcagtgttcatcacttcaacttttttaccgttgcgataggtgatgatatcgcccagcttgaacgcattgccgctaatcaggttatccgcacagcagaggaacagcttcacgcgcttgttcagtccgcgcgtaatggcaaatgccagcgccccggtaaccgttgccgcgccgcccatgtcgctcttcatgctgtccataaacgcagtctgtttgatgctgtagccgccggagtcaaaagtgatacctttacctaccaggcacgcgtacactggcgcttctttatcgccagttgggttgtaatccagcgccagcaataccggagaacgttcactaccgcgtccgactgtgtgcagccccatataaccttgctcacgcagatcttcgcctttggtgatccgataagtcacacgatcgcccgcgacgttgctgatcagatcaacagcacgctgtgccagttggcttggtcccaattcttctgccggtgcgttgatggtgtcacgcacccagtcgatgatcatcaggcggttatccagttcctggcgctgggcatcgtccagatccggccacaccactttacgcgtgcctttcggggctttgtaaccttgccagaatgcccagcagcgatccgcatcccagccttcaccgcttaactgaacatgcttgatgcccagaccgtcaatcttgcgcgccgcacgctggatcagccccagatcgtctgccccgttcaaatgcagggtaatgccgtcattattaatgctgtaagttgctttttctccccagcgcgcgtcggcaggttgggtagagagggtaatcttcatcgcttctgtcattttagttatccttctttgtaaaagggccgccagttggcagccccaggatttttccgctaaatgattcgcgttgcaggaaggcggcaagtgagtgaagccccaggagcatagataactatgtgactggggtgaacgagcgcagccaacgcatctgcggcgtgaagcatgacgcggaaattattcggcctcgtccagccagactaacaaaatcgcttcgaggattttctcgttggatgcctgcgggtcgtcgtcgaaatcttccagatcgcaaatccactgatgcatatcggtgaatcgaaccgttttcggatcaagatcgggatacgcatcgtacagtgcttcgccaatttcgcggctatcggtccacttaagtcccatactaacctctgttaatgctcacgcgcatggttgatagtgtaacgcgggatttcgactactaaatcttcgtcggtaacgcgcgcctggcagcttaaacggctttccggctccagtccccaggctttgtccagcatgtcgtcttcctgctcactgctttccggcagactgtcaaaaccttcacgaacgatgcagtggcaggtggtgcaagcacaggatttttcacaggcgtgttcaatctcgataccgttacgcagagctgcgtcgagaatggtttcaccgctattagcttccagaacagcgccatcagggcagagatcctgatgaggcaaaataacaatctttggcatattaaacctcgtccacggaatggcctttcagcgcacgacgaacgctctggtccatgcggcgagcggcgaaatcctgggtttgtttgtctacgtttttaatcgcttgttcgatggcgtcaacatcatcgccctgcgccacttcactcaggtgagcggcagcatcgtcaatgacctgacgttctgcggcgcttaacagcgcggcatcagcagccagcgcgccgtgcagactttccagcacacgcgccgcttctactttttgttctgccagcattcgggcttttacgtcctgctcggcatagctcatactgtctttgatcatgctagcgatttcgctatcggtcagaccgtaagacggtttgacctgaatagacgcctcaacgccggtggatttctccatcgccgtcacgctcaaaagaccgtcggcatcgacctggaacgtcacgcgaatatgcgcaccgccagccggtagcgccggaataccacgcagcgcaaaacgcgccagactgcggcagtcctgcaccagttcgcgctcaccctgcattacatggatagacatcgccgtctgaccatctttaaaggtggtgaaatcctgagcgcgggccaccggaatagtggtattacgcggaatcactttctccaccaggccgcccatcgtttcgaggcccaggctcagtgggatcacatcaagcaacagcatttcgctgtctggcttgttacccaccagaatatccgcctgaatcgccgcgccaatagcgacgactttatccgggtcgatggaagtcagcggtggacgaccgaaaaattcgcctacccgttcacgcaccagcggcacgcgagtagaaccgcccaccatcaccacttccagcacttcatcagcttctacacccgcgtctttcagcgcgcgacgacaagccagtaaggttcgttttaccagtggcgcgatcagttcattgaattgttcacggctgatttcgccctgccagcccgcaacgttaacggtcacggagtccgcatcgctcagcgcgattttggctgcaatggcggcatccagcagttcacgctgaacgcggttatcgctacgatcaggaatgcccgcctgctcgcgaatgtaatccgccagcagatggtcgaaatcatcgccgccgagcgcggaatcaccgccggttgccagcacttcaaacacgccgcgacttaagcgcagaatggaaatatcaaacgtcccgccaccgaggtcataaacggcgatcacgccttcctgaccggaatccagcccgtaggcgatagccgcagcggtcggttcgttaagtaagcgcaggacgtgaaggcccgccagacgcgccgcgtctttggtgccctgacgctgggcatcgtcaaagtacgccggaacggtgataactacaccatccagctcgcctgccagggcttcagttgcccgcgccgccagtgctttgaggatgtccgcagaaacgcgcaccgggttcagcagccccgccgccgtttcaatcatcggcaggccgttttcgctggcctggaattgataaggcagatgcggatagcgttgctggatatcagccaggctgcgtcccatcaggcgtttaacagaactaattgtgttggcggtatcgagcgctgcattagtacgcgcgtcataacccacgctatgcccttgctgttgatagtgaacaacagatggcagcaggtgacggccttcatgatcggctaacgtttcggcctgaccgctgcgcactgtcgccaccaggctgttggttgtgcccaggtcaataccggccgccagacgacgctgatgcggcgcagcactcaaaccaggttcactaatttgtaataaggccatgtttagcttccagaaattaaaaatcgagcagtttttcttcgagttgttcggcactgcttcgcagtttatcgagaaaacgcagcttacgcacggtatccgccgccgcgtcccacgtctcgttgtctaactgttcaaccatcaactgatggcgggtatcaaacatctttttcacacgtttgataaagctttccagccgcgcttcatctttcgcctgttcgatctcgtccagctcttcgcgcagctccaactgttccatcaggaacgcggtgtcgcgcacagtatgctgctcgctggcgagatcaaagccgtgcaaagaaagcaaatattccgcgcgcattaacggatgacgcagcgtttgccaggcctggttaatggttgcagattgctgtacggcggcgagttgttccgcctggcttccgctggcgaatttatcaggatgatactgacgttgtagatcctgaaaacgcaggctcagcgcctgggtatcgagttgatagcgggcaggcaagccaaagagggtgaagtaatccataacattctcagggctgcgatccgccgcgataacggcgaatcaggtaaaacaaaccccacgcgcaggcgaccacggtggggttatcggtatgcgcatcaaacgtggaagctttcgccgcaaccacactcatctttgacgttcgggttggtgaatttaaacccttcgttcaggccttcttttacgaagtccagctgcgtaccgtccagaaattgcaggctcttgccatcgaccacgactttcacgcctttgtcttcaaacacgatgtcttccggcgtcggttcgtcaacaaattccagtacataagccataccactacacccggaggttctcacgcccagacgcaggccaaaccctttaccgcggttagccagaaaggtatttactcgcgctgctgcactgtcgctcagtgtaatgctcataaccaaacctcaactcttattttgcttcacgtttgcttttatagtccgcaatggcggctttgatcgcgtcttctgccagaatagaacagtgaattttcaccggcggcagttcaagttcttcagcaatatcggtgtttttgatcgcctgcgcttcgtcgagagacttccctttcacccattcggtgaccagggagctggaagcgatagcggaaccgcagccgtaagttttaaaacgcgcgtcttcaatgataccttcatcgttgactttaatctgcaacttcatcacgtcgccacaggccggtgcccccaccatgccgctgccgacgttctcgtcgttgttgtcaaaggaacccacgttacgcggattctcgtaatggtcgataactttttcgctgtaagccattataaattctcctgattccgataccgattaatgatgagcccattcgatgctgttcagatccacgccctgcttgtacatttcccacagcggagaaaggtcacgcagacgaccgatggatttacgaactaactcgatggtgtagtcgatctcttcttcagtagtaaaacgacctaaagagaaacggatagagctatgtgccagctcgtcgttcagccccagcgcgcgcagcacgtaggacggttcgaggcttgcactcgtacaggcggaaccactagaaactgcgaggtctttcagcgccataatcaggctctcaccttcaacgtagttgaagctgacgttgagaatgttcggcgcaccgtgttccaggtcaccgttcaggtaaacttcttcgatatctttgatgccgttccacagacggttacgcaggccgcgcagacgttccatctcggtcgccatctcttcttttgcgatgcgataggcctcgcccattccgacgatctggtgaacaggcagagtgccggaacgcataccgcgctcgtgaccgccgccgtgcatttgcgcttcgatgcgtacgcgcggtttacgacgtacatacagcgcaccgatacctttcgggccatagattttgtgaccggagaaagacatcaggtcaactttcaactggctcaggtcgataggcagtttacccacgctctgggttgcatcaacgtgatagataatgccacgagcacggcacatttcgccgatagccgcgatatcctgcaccacgccgatttcgttatttacgtgcatgatggacacgaggatggtgtcgtcacgcatcgctgcttcaagttctttcaggtcgataatgccgttacgctgcggtgccaggtaggtgacttcaaaaccttcgcgctccagctgacggcaggtatccagtaccgctttgtgttcggttttgctggtgatgatgtgcttgccttttttctgataaaagttggctgcacctttgatcgccaggttgtcagattcggttgcaccagaggtaaagacgatttcacgcggatcagcgccgaccagatcggcaatctgattacgggcgatatctaccgcttcttcagcctgccagccgaaacggtgagaacgggaggccgggttaccaaaggttccgtccatcgtcataaactgcatcattttctcggcaacacgcgggtccaccggcgtggttgcggagtagtcgagataaatcggtaatttcattgctctataaactccgtacatcactcaatgcaaggaatcaggctaccggctggatgtacgaccgtgtttacggagtatttagcactccggcctgattctgaattctttttattaagcgcgtaacttaacgtcgatcgcgtcttgtgtgcgggtgcgtggcgcgtcgtgagtatgctgacgaccagacacatccagcacttcctggttattaaccagttcgcctaaagtaatgttgttgagaaaaccggtgagacggtcgctcaaatcacgccacagcgcgtgggtcaggcatttatcgccgccctggcagccgcctttaccctgacaacgggtggcatctacagattcgtcaacggcgctaattacttcgccaacggcgatgctgctggcatctttgcctaacagataaccaccgcctggtccacgtacgctggaaaccagaccatttttacgcagacgggaaaacagttgttccagataagaaagggaaattccctgacgttcggaaatatcagccaacggtaccgggcccgcttcagagttgagcgcaacgtcaagcattgcggtcacggcatagcgccctttagatgtcagtctcatgtcttacttcacctcaaactcgcccctgcccggggttttttattgtaaaagtgggggtattgcatagcagggtcaagtctgacattcccgagtaaattggtcaactatttacttgactgatttagtcgggtatttaaccttcagtgccatttttttatcgtggcgtttgtacctgttgtcggatgcggcgtgaacgccatatccgccctggggttctgtacactgtaggcctgataagacgcattacgcgtcgcatcaggcaacggctgtcggatgcggcgtgaacgccttatccgacctacggttctgttcactgtaggcctgataagacgcattacgcgtcgcatcaggcaacggctgtcggatgcggcgtgaacgccttatccgacctacggttctgttcactgtaggcctgataagacgcattacgcgtcgcatcaggcaacggctgttattcggccttgttacctttattctgctgctcaatagaagccagaatcccgcgcaggatattcaactcctggctttccgggcgcgcacgggtaaacagacggcgcaatttattcatcacctgccccggatggttttcacggataaaaccggttgccagcagcgtttgttccagatgaccataaaaacgctccagatcatcgaccagcggatacggcgtctcttcatgctcgacctgctcgccgttttcctgagttgccagccaggccatgcgcacttcataggcaataacctgaaccgccatcgccaggttcaggctgctgtattccgggttagccgcaatcgcgacatgataatggcatttctgcaactcttcattggtcaagccgacgcgctcgcgaccaaacaccagcgccaccggggtatttgccgcttcagcgacgcttttcaggccgcattcgcgcgggtcgagcatcggccatggcagcgtgcgggaacgtgcgctggtgcccaccaccaggctacaaccggctaacgcttcgtcgagcgtatcgacgatgtgagcattaccaatcacatcgctggcccctgctgccagggcaatcgcctgggagtcgggtttcaccagtggattaaccagccacagattggttaatcccattgttttcatggcacgggcaacagaacccatattgccggtgtgactcgtctccaccagcacaattcgaatattttgcagcattgtctttcttcatctaaagattattcacgcatcttatcataaaacgaagacagatgccgatctcgctgctatactctgcgccgttttcccgttctttaacatccagtgagagagaccgatgcatccgatgctgaacatcgccgtgcgcgcagcgcgcaaggcgggtaatttaattgccaaaaactatgaaaccccggacgctgtagaagcgagccagaaaggcagtaacgatttcgtgaccaacgtagataaagctgccgaagcggtgattatcgacacgattcgtaaatcttacccacagcacaccatcatcaccgaagaaagcggtgaacttgaaggtactgatcaggatgttcaatgggttatcgatccactggatggcactaccaactttatcaaacgtctgccgcacttcgcggtatctatcgctgttcgtatcaaaggccgcaccgaagttgctgtggtatacgatcctatgcgtaacgaactgttcaccgccactcgcggtcagggcgcacagctgaacggctaccgactgcgcggcagcaccgctcgcgatctcgacggtactattctggcgaccggcttcccgttcaaagcaaaacagtacgccactacctacatcaacatcgtcggcaaactgttcaacgaatgtgcagacttccgtcgtaccggttctgcggcgctggatctggcttacgtcgctgcgggtcgtgttgacggtttctttgaaatcggtctgcgcccgtgggacttcgccgcaggcgagctgctggttcgtgaagcgggcggcatcgtcagcgacttcaccggtggtcataactacatgctgaccggtaacatcgttgctggtaacccgcgcgttgttaaagccatgctggcgaacatgcgtgacgagttaagcgacgctctgaagcgttaatgactcaggcgggtgatatcactcacccgccctcgcctttcaggcgctattccgaaatacttcctcactgctttactttctttcgtcactctcccaccatctttccccgattaatggatgataaagaagagccaaggaaaggttatggcactgccagtgaacaaacgcgttcccaaaattctgtttattctctttgttgttgccttctgcgtttatttagtgccgcgcgttgccatcaacttcttctattatcccgacgataaaatttacggtcccgatccctggagcgcggaatccgtcgaatttacggctaaggacggtactcgtctgcaaggctggtttatcccttctagcacgggccctgctgacaacgccatcgcaaccatcattcatgctcacggcaatgccggaaatatgtccgcccactggccgctggtcagttggttacccgagcgtaatttcaacgtttttatgtttgattatcgcgggtttggtaaaagtaaaggcacgccgtcccaggccggattgctggacgatacgcaaagtgccatcaatgtggtgcgccatcgcagtgatgtaaacccacaacgtctggtgctgttcgggcagagtattggcggggcgaatattctggatgttattggtcggggtgatcgtgaaggcatacgtgcggtgatcctcgactccacatttgcctcttatgcaaccatcgccaaccaaatgatccccggcagtggctacttacttgatgagagttacagcggcgaaaattatatcgccagcgtcagcccgatcccgcttttactcattcacggtaaagctgatcacgttatcccatggcagcacagcgaaaagttgtatagcctggcaaaagagccaaaacggttgatcctaatcccggatggcgaacacattgatgctttttccgatcgtcacggcgatgtttatcgcgaacagatggtggactttatccttagcgcgttgaatccgcagaactaacccatgatcgctagcacgataatcattcacaaaaccaccttaagacatgctaatccactggtcagaacagtttaagatgagaaaaattctgtgacgcttgccaacatttctgatgattagcattcccttcgccatttccttgagcaaactttagctattcttatcaattatgcttatgggagatctacagatgatgcctacgcttgctccaccatctgtccttagcgctccccagcgccgctgccagatcttgctgacgctctttcagccggggttgaccgccaccatggcaaccttcagcgagcttaatggtgtggatgatgatattgccagtcttgatatcagcgaaacaggacgggagatcctgcgctatcatcaactcacactgacgactggttatgacggtagctaccgggttgaaggtacagtgcttaaccaacgtttgtgtttatttcactggctacgacgtggtttccgtctgtgtccgagttttattaccagccaattcacccccgccctgaagagtgaactgaagcggcgcggaattgcgcgtaacttttacgacgataccaatctacaagcgttagtgaatctctgctcccgacggctgcaaaaacgctttgaaagccgcgatattcatttcctgtgtctgtatctgcaatattgtttgctgcagcaccacgctggaattacgcctcagtttaatccgctccaacgtcgctgggcggaatcctgccttgaatttcaggtagcgcaggaaattggacgccactggcagcgtcgggcgctccagcctgtaccacctgatgagccactgtttatggcactacttttttccatgttgcgggttcccgatccattgcgggatgcgcatcagcgggacagacaattgcgtcagtctatcaaacgtctggtaaaccattttcgtgagctgggaaatgttcgtttttatgatgaacaggggttatgtgatcagctttatacccacctcgcccaggcgttaaatcgcagtttgtttgccatcggtattgataataccctgccggaagagttcgccagactgtacccacgcctggtgcgcaccacccgcgcggcgctggccggatttgaaagtgaatacggcgtccatctttctgatgaggaaagtggtctggtcgcggtgattttcggtgcctggctaatgcaggaaaacgatctgcatgaaaaacagattattcttcttaccgggaatgatagcgagcgagaagcgcagattgagcagcagttacgcgaactaacgttactgccgctcaacattaagcatatgagcgtaaaggcatttttgcagacaggcgctccgcgtggcgcggcactgattattgcgccttataccatgccattaccgctctttagtccaccgctgatctatacggacctgacgctgacaacacatcaacaggagcagatccgcaaaatgctcgaaagtgcatgatcagcaactgggaacaactttcgggcgcaaaaacattgccggaagcgccaccagcgccattacccagaacacgccgtggcccagatattgatacaggaaaccggcgaaaacggtcatgatagcgatactgccgcccatcgcgacggcagagtaaaccgcctgtaaacggatgacttcgctaccctggcgagcagcaatataacgcatggcggccaggtggcagaccgtgaaggtgccgcaatgcagaatttgcaccactatcaaccacggcaacgccgtagttgctcccataatgccccagcgcactacgccgcaaatcgcgctgatcaacagcatatcgcgtgcactacaacggcggaaaagtttattactcagcgcaaagataatgacttccgccaccacgcccaggctccacaaataccccaccgcgctggcgctgtagccagctgcctgccagtaaatggcgctaaaaccgtaataggccgcatgtgccccctgcaataaacaaacgcaggccagaaagcgccagttctggcgaaccagcgccaaccacgcagaccaaccggtgctctcctgctggcgacttgccccttgtggctgaatcgtcggacggatgagaaagccgagcagcatggatgccacgcccaacgtcaacagcgcgaggatcacccgataatcaaacatagtgaccagtttgcccgtcagcgcgctgccaatgacaaacgccacgctgccccacagtcgcactttgccgtaatcaagcgggaactgcttttgccacgtattcgccagtgcatcggtcaacggtaccagtggactgaaaaagaggttaaagccaatcatcaccagcatcagccacgctacgtgcgcccccgcccagaaggcgacagcaaagagaagtgtcagcagtgccagcacgcgcaaggcggaaatcaggcgggaaggatcgctgacgcggggcgcgatgagcaaactcccgaggaaacgggcaaccagacctgcccccaataacaggccgatggtttctggcgttaaaccaatccctttaagccagacgctccagaaaggtagaaaaatgccgtaactaaaaaagtatgtgaaatagccgagcgccaaccagcgcgtggattgcaaaaccatgagtccctcccgtcaggaggcgttagtctggggttaatcgaatgttggtgcaagttgaaaaataagaatattcgagcctgcttcccgatgtctgtaacgccagttcacaagcactaaaaaactgagatccgcgacgcatgttgcaaaaataatgcgtaattatgccgttacgcttgccaaacgttcctgcacaatggcgatgaaatcgcgtaatgccggcttcatctcccctttcttccacgccatcagtaaagcaatggaaggcacatttccggcaatgggacgaaaaacaacctgtccggtattaaaattattcatataaccgggtatcaaagtgacgcccagccccatgcccaccagattcatggtcaccagaatattcgttgccacctggacgatatttggctggctgttttcttgcgcaaaccacgctttaacgatcggcgcaaggctaccggaatacaccggatcggtactgacgaaattcacgccatccagttgcgcggcggtgatctctttttcatgtgctaaagggtgatcaaccggtaacacaaccactaatggttcgtcaaaaagctccagataatcaatctccgggctataaacaggatggcgcattaagccgacgtcgagttcaccacggcgaattttttcctcctgttgcgtggtgattaaactcaccagctcaatcaaggtgtctggctgtctgagacgaaacatcggtaatacttttggcagtaaattcacttccgcgcttggcacaaagccaatggttaattgtctgtcttcctgaacaattttccgcgcccgtaatttggcattttccgcttgttcgaggattgccagcgcgtcctggagaaaacattctcccgccgccgtcaacgcgactttgcgcttatccctcaccagtaacggaacaccgacacagttttcaagatcgcggatctggctgcttaagctaggctgactggtatgcagtttttccgccgcacgggtaaagttcagtgcctgcgccactgcgacgaaatagcgtaaatgccgtagttccatcaccttccccttgttatcgaaaaaacgtctcagctggtagaaattaactatttcacatattagcaaccaaccagcaacatccttatggcacaaaaatagaaggtcaatacatcttatctttcaggattaaaaaatatgaccacacccagtgatttgaacatttaccaactgattgacacccaaaatggtcgggtcactccgcgtatttataccgacccggatatttaccaactggagcttgagcgtattttcggtcgttgctggctatttctcgcccacgaaagccagatcccaaaacccggtgatttctttaacacctacatgggagaagatgcggttgtcgtagtgcgtcagaaagacggcagcatcaaggcgtttctcaaccaatgccgccaccgggccatgcgtgtgagttatgcagattgcggcaacactcgcgcctttacctgcccgtatcacggctggtcttatggcattaacggcgagttgatcgatgtaccgctggaacctcgcgcctacccacaagggttgtgtaaatcccactggggactaaacgaagttccttgtgtggagagttataaagggctaatttttggcaactgggataccagcgcaccgggcctgcgtgattacctgggtgacattgcctggtatctggatggcatgctggatcgtcgcgaaggcggcaccgaaattgtcggcggcgtacaaaagtgggtgatcaactgtaactggaaattcccggcagagcagttcgccagtgaccagtatcatgctctgttcagccatgcttctgccgttcaggtattaggggcgaaagatgatggcagcgataagcgcctcggtgatggacaaaccgcccgcccggtgtgggaaaccgccaaagatgcgctgcaatttggtcaggacggtcacggtagcggtttcttctttactgaaaaaccggatgctaatgtctgggtcgatggcgcagttagtagctattaccgcgaaacctatgccgaagcagaacaacgtttaggtgaagttcgcgccctgcgcctggcgggtcataacaatattttccccacgcttagttggctaaacggcactgccacactccgcgtctggcatccgcgcggccctgatcaagttgaagtgtgggcgttctgtattactgacaaagccgcctccgatgaagttaaagccgcttttgaaaacagcgccactcgtgcttttggtcctgctggttttctcgagcaggatgacagcgagaactggtgtgaaatccagaaattgcttaaaggccaccgcgcccgcaacagcaaactgtgtctggaaatggggcttggtcaggaaaagcgccgcgacgacggcattcctggcattactaactatatctttagtgaaactgccgctcgtggaatgtaccaacgctgggccgatcttctgagtagcgaaagctggcaggaagtgctcgataaaaccgccgcttaccagcaggaggtgatgaaatgagtgcgcaagttagtctagagttacatcaccgcattagccagtttctctttcacgaagccagcttactggacgactggaaatttcgtgactggctggcgcagctcgacgaagagattcgttacaccatgcgcaccacagttaacgcgcaaacacgcgaccgccgcaaaggcgtccagccaccgacaacctggatttttaatgacaccaaagaccagctggagcggcgaatcgcccgtctggaaacgggcatggcctgggcagaagagccgccgagtcgcacccgtcacttaatcagcaactgccagataagcgaaaccgacatcccaaacgtatttgctgtgcgggtaaattatctgctttatcgggcacaaaaagagcgcgatgaaacattctatgttggaacgcgtttcgacaaagttcgccgtctggaagatgacaactggcgcttgctggaacgggatatcgtcctggatcaagcggtaatcacttcccataacctgagtgtactgttctgatgaatcgaatttatgcgtgtcccgttgcggatgtgccggagggtgaggctctccggatcgataccagccccgtcatcgccctgttcaacgttggcggcgagttttatgccattaacgatcgttgcagccatggtaatgcgagtatgagtgaagggtatctggaagatgacgccacggtggagtgcccgctacacgccgccagtttttgcctgaaaacggggaaagcgttatgcctgcccgccaccgatccgctcaccacttatccagtacacgttgaaggtggtgacattttcatcgacttaccggaggcgcagccatgagcgatctgcataacgagtccatttttattaccggcggcggaagcggattagggctggcgctggtcgagcgatttatcgaagaaggcgcgcaggttgccacgctggaactgagcgcggcaaaagtcgccagtctgcgtcagcgatttggcgaacatattctggcggtggaaggtaacgtgacctgttatgccgattatcaacgcgcggtcgatcagatcctgactcgttccggcaagctggattgttttatcggcaatgcaggcatctgggatcacaatgccagtctggttaatactcccgcagagacgctcgaaaccggcttccacgagctgtttaacgtcaatgttctcggttacctgctgggcgcaaaagcctgcgctccggcgttaatcgccagtgaaggcagcatgattttcacactgagtaatgccgcctggtatcctggcggcggtggcccgctgtacaccgccagtaaacatgccgcaaccggacttattcgccaactggcttatgaactggcaccgaaagtgcgggtgaatggcgtcggcccgtgtggtatggccagcgacctgcgcggcccacaggcgctcgggcaaagtgaaaccagcataatgcagtctctgacgccggagaaaattgccgccattttaccgctgcaatttttcccgcaaccggcggattttacggggccgtatgtgatgttgacaagccggcgcaataatcgcgcattaagcggtgtgatgatcaacgctgatgcgggtttagcgattcgcggcattcgccacgtagcggctgggctggatctttaaggaagcacgatgaaagaaaaaacgatcattattgtcggtggcgggcaagcggcggcaatggctgcggccagcctacgccagcaagggttcaccggtgagctgcatctgttttccgatgagcgacatcttccttatgaacgacctccactcagcaaatccatgttgctggaagattccccgcagttacagcaggtgttacccgctaactggtggcaggaaaacaatgttcatctgcattccggtgtaaccatcaaaacgctgggtcgcgacacacgagagttagtgttaaccaacggcgaaagctggcactgggatcagctttttatagcaaccggcgcggcagctcgaccgctgccgttgcttgatgcactgggagaacgctgctttaccctacgccatgccggtgatgccgccagactgcgagaagttctgcagcccgaacggagtgtcgtgattatcggtgccggaactattggtctggaactggctgccagcgccacgcagcgcagatgtaaggtgacagtgattgaactggcggcaaccgtcatgggccgtaatgcaccaccgcccgtgcaacgctatcttttacagcgccaccagcaggctggtgtgcgcattctgctcaataatgccattgaacatgtggtcgatggtgaaaaagtagaactgacgctgcaaagtggggaaacgcttcaggctgatgtggtgatttacggtattggtatcagcgccaacgagcaactggctcgcgaggccaaccttgatactgccaatggcattgtcattgatgaggcttgccgcacctgcgatcccgcgatctttgccggtggcgatgtggcaatcactcgtcttgataatggtgcactacaccgctgcgaaagctgggaaaacgccaataaccaggcgcaaattgccgctgccgcaatgttagggctaccgctaccgctactgccgccgccgtggttctggagcgatcagtacagtgataacttacagtttattggcgatatgcgtggcgatgactggctttgtcgtggcaacccggaaactcagaaggcgatttggtttaatctgcaaaacggcgtgcttatcggtgcggtcacgctgaatcaggggcgtgagattcgcccaattcgcaaatggatccagagcggcaaaacgtttgatgcgaaactgctgatagatgagaacatcgcgcttaaaagtctgtaaccaggataattagcgaatatctcaatgcctggggcgtggcgaggtgcaagagtgtgtattacgtttaaaagtcattatcttgcaaagggattggttatgaacacactacgttattttgattttggagctgcccgccccgttttgttattaattgcccgtatcgccgtggtcttaattttcattatttttggttttcccaaaatgatgggctttgacggtacggtccaatatatggccagcttgggcgcgccaatgccgatgctggcagcgattattgcggtagttatggaagtgcccgccgcgatattaatcgtgcttggctttttcacccgtccgctggcggtgctgtttattttctacacgctgggtacggcggtgattggtcaccattactgggatatgaccggcgatgcggttgggccaaatatgattaatttctggaagaatgtcagtatcgctggcgcgttcttgctattggcaattaccgggccgggggcaatttctctcgatcggcgttaagaaagatgccggatgcggcgtgaacgccttatccggcatttaataaattacagccactctacccgcaagctcatctcactagttgtactttcccctggtgctagcgcaatgagatcacccccttccgggcgatgatgatcatccggcgcatggctcatcggttccagacagaagaaatcaaacgcatatcctttatcaaacgcagggtcggaaacaaagatgaaataacacggtgcaggtggcgtcgtttccatgatgatggcataaccttcctgcggctgctcgatgcgggcctgaccattccatccggcaaaaccattgttcacccactggcgcggcaacggcgcgggctggttaaaatccagttcctgcggtagctgctcgcaaaactcacccgccagccactgctcccgctccagccagtaaccgctcgcctgtgcctgaatccgcgtttgcgggctcaacggaaaataaggatgccagccggtaccaaatggcagcgtctctgccccttgattggtgacagagagcgtcaccgtcagcgtatccgccgttaaatgaaacgcctgacttacccgatagtgatagacaccgctgcgatgttcatacaccagacacaaactatcatcgctgtggctgacacattgccactcgcccagccagccatcgccgtgtagatagtgcgcatcccactcaacattcggttgcagttgatactcacgcccctgccagacaaaacgattgccgctcacccggtttgcaaatggcaccagcggaaaacaactggcatcggttgccacaccgctttttttaccaggacgtaagagcggcgtcgtatcgcgccagaagccttcgattacgccgccctggtcagaaacgtccagctttaggctcccgtgggataaggtatagatggtcatccgctaactccttaatccgggaagttaatcacaactttcccgcatttgccgctcgccatcagcgcataggcatcacctgcctgttccaggctgaagcgatgggtaatggcgttacgcggccacagcttccagtccgtcagatcatgggcgcatttttccatatggaacagactggtcacccaggagccgataatccgccgttgatggtgcatcagatcggcgctgacctcgaattccacttttccggtttcaccaatgtaaaccacccgtccccagtcagcggtggattgcagtgccagcaagcgacctgcggcattaccggaacaatcgagcgcaacatccgcgccaccgtgggtgagttcggcgataatctgcggcagaccttcggtggttgctaaatagccgtgatccatcacccctaactgttttgccatcgccagacgttccggcagcatatcaacgccgatgatccgttttgcaccgcgacctttcgccagcatcatcgccatcatgccgactggccccagaccgaccaccagcacgttatcactgccggaaacttcgccgcgcaaaattccttcatacgctgtaccaacgccgcaactgataaacgcaccatcttcgtagctcagcgcatccggcaggaggatcagatctttttcttccgccagcaagtattcggcatgaccgccgtcacgctgccagccgtaagccgcttttccttcgccagtacaagaaataggaaaaccgcgacggcagttcgggcaaaaaccacagccagaaatgtgatacaccagcacgcggtcgccctctttaaaatggcggcagccttgccccatcgccacaatctgcccgcacggttcatgaccgttgataaagccctggtataacggtttatcgggtgccgccgctgtggcacggtgttgatgatagatatagtggacatcgcttccgcaaatcccggaggatttcattttgatcagtacctggttaatccccggcgtcggcaccgcaacttcccgcagatcgacggtgctatttcctggtaaataagctgccagcatcgttttcataaatccctcattaacaatacgattaattttcatccctgccgcacccgcgccaggggcgttaaggtttagcgtttcgctttactgcttcgctgggtcagcaagatattcgccagcaccgccaccacgatgatgacgccgcgtaccacctgctggaaaaaggagttaataccgagcagcaccagaccgttaccgattagcgtaatcaccagcacaccaagcaatgtaccgaacagggaaccgcgaccgccggaaagtgccgtaccgccgaccacgaccgcggcgatgacgtcaaactccagaccgtttgcggcacctgcgttaccagaaccgaggcgcgccgccaacaaaatgccggtcaccgccgctaataatccgctaagggtaaagataagaatgcgcacccgacgaacgttgatgccgcacaactgcgccgccgtagcattaccgccaacggcaaaaacgctgcgcccgaaggcggttttgcggctgatgaacacaaacagcgcaaacaacacaatcatgatcagcgcggataccggcacaccgagaaattgtccgcccagccagtccagcacctcgttttcatcaatcggcactggcagtgcgttcgtcataaacagccccattccgcgcagggcgctccacagccccagtgtggcaacgaaacttggtacattaaacacgccgcgcagcaccccggccagcgttcccatcagcgcgcctaacagcaacaccagcaggcacgccaccgccagcggaacttcaaattgcagcaaaaatgccaggcacacgctgacaaaagccaccatcggcccaacgctgacatcaatttcaccggagataataatcagcgtcatcgcccaggcggcaatcccaatggtggcggcatcgcgcagcacgttcatctggttattcaaactgataaagccaggcgcgttcagggagaagaccagataaagaatggcaatcaccaccagcaaaccgatctcattaatatggcgactgacaaattgtttgaggctgacgctcttgccctgcggcaatggtaaactgctagcagacatcttcaggttcctcggtaaaattcatcagtgcacagacagaatggcggacatcagctcatccacattgaccggagcgtgaaactcctggctgaacgtgccgtgctgtaataacaggatgcggtcacacaccagcggcaactcctccacttcactggagataaacaccacgctttttccttcggcagccagctcacggacaatacggtaaatctgctgtttggcttcgatatcgacgccgcgcgttggctcgtcgagcaacaaaatctggctggcagcatagacccaacgaccgatcaccactttttgctgattgccaccagaaagcgtgccgatgggtgtttcgctactggcggccttgaccgtcatccgctgcatcacctcttcggtcaggcggcggatggtggaccattgcagcacaccgttggcgctgattttttgccgattggtcagcactgtattttcgtcaacgcccaaccagggaatgatccccgcttctttgcggttttctggcgtatagccaatgccgcgtttcagcatgtcgccgtaatcggggcgcgtgattttctcgccgttgataacaatttcgccctgttcatactcctccagcccaacaatcgccttcagcaattcactgcgccctgcccccagcagaccagcaatgccgagcacttcgccacgacgtagcgtaaaactgatatcctccagcttgggcttatggcgtaacgcacggacttccagcacggcctgatccacaatttcctgaggggctaccggcgcaatatcaacgtgatcgcgcccgagcatcaggctcacaatatgatgcgtggaggtgttttcgagcatcacatcgcccgccacctgaccatcgcgcataacggtggcacaggaggcaatgcggcgaatttcttccatccggtggctgacataaatcaccgccacgcccagtgcgctcatctttttcaccgcgctgatcaccagttcaacttccgcactcgcaaggctactggtaggttcatcaagaatgaccacgcgcggctcgcccttcatcacccgcgcaatttccaccagctgcttttgcgccgggcttagcgtactaacaagttgttcaggactaacgtcaacgcccagcgcctgtaagcaacgttgggcatcctgcgccatttgcaggtaatcaatcatgccgttgcggcggggccactgaccgaggcagaggttttccgccactgtcagcccttccaccagacttaactcctgataaaccgcgcgcacccccagttcagcggcacggcgagtcagcgtagcttcgtcaccttccagtcgcgtctcgccaatccagatatcaccgctatccgggcgttcgctgccggtaagcattcgaatgagagtgcttttgcccgcgccgtttttacctaacagcgcacgaacttcgcctttattgagcgtgaagttaacgttatccagcgcaacgacgccgggataacgcttatttcctgccaccacttttgctaccgggactgcctctgttgccgtgaacatagggacctctgcgaatcagcgattagggcagaccatcaacgtgcgttgccagccactgtttaccgtcttccgttttggtatagagatcgataggcacctgaatcactttttcaccgtcggcttgtttattgataaccttcaatgtttgcgcgaaaacagcattgcccattttcttaccggaaatatccactaccgctttcagcacctgattgttttccagctcctgagcaatttcggttgtcatatcgctaccgaaaacagcaatttttccggcctgattttgattacgtaccgcttttaccgcgccgagtgtcgcaccgccgctttcccccataatggcgttgagatccggcgtggagataattagtttttcaccaacggaaatcgctttatctaaaacagtcccttcctgattagcgacaatttgcgcgccgggaacgcgggattttaaaacttcttcaaatcctttacgtcgctgcacacaaacttcaaaggcttcgcaattgatgacggcaattttcggctggtcaattttattggcaataaaataatcagcggcagcgttacccagttttttaccaaattccagcggatcgccgaccagatacgcgctgacatatttatcgacccccttttgattaatacaggtgttgtagcaaatcaccggaatgcccgcttcactggcgcgacgaacggtacggctactgccattttcagacactgcgcttaaaataatggcatcgacattacgcgccacgagggtatcaacaaaggtactttctttgctaatatcaccctgggcgttagtttctattaactgaacttgtacactggaatcttttgccgcatcctgaacgccctgacgcactccagcgtagtatccctgagtatcaaggtatattgcgccaatggtcatttctttttccgcagccctggcaaatagtgcgctacctaatagcgtagccattaataatagattacgggttgttctcatttttgtaggcatagagcctcctgtagggtttttattaacaacggcttattctaattattttgtgatgagcggcagcgcgtgccgctcaaatattacagttaatagggtttagtgaacgcggttaaaaataaaaggcatcacggtggtgaataatgccgctttcggccaagccggattaatcgccgtcaattcagcgcgagcagactcatattgcgcaacctccccgagtcccgcggacgccagcatcgccaccatcaggcatttttctttatgctgctgttgtaaatcgccatacaggctcaacaagtcaggttggctgacggcaaagaaatccgcttcgatactggttttcgccatctcttgcgcccactgtttcatttcactaaacagttgctgtgcggtttgttgttcgcccagcagtcgcagcgccatcccttgccagaagagataatcaaccggctgatcgttgtaataactgtgaatgttaatagtgcgatcgccggtcgccgccagacgtaaacaacgcgtcgcttcagtttcatcgccctgcgcgttggcgcatatcgcctgccagaaccagatgtcgttatcagtttgccccggtaaacggccttcgcttaaattctccggataatgcagcgcggcatgaagcagttcgcaggcctgctgcggctgtctggcatcaagatgctgccaggcgcgtaataactggttgaggataaactgactggtgaccttcccttccccgccttcccacgggtggaatttgcgcgtggcgagaatgtccgccgctttgtctgcctgacccgtgagatgccacaaattgagcagttctgcggtcatgtcgtcgcgtttcagcgcaatttccagattattttccagacgcgccagtcgtttctccggtgtggctccacttaacttatccagcaaatcccgttcgaaaagcagacgtgcatcctgcggcgcaagctgataagcattatcaagataacgcgcggccagctcataatcgtgttgcttattccacgcatggatcgctaacccgcgccagccgtcggcaaactccgggctcatctctacgcaacgttgccaaaaggcaatggctttgttgtagctacgtttgttgtagtagaagcaagctagtaaatggcgagcaaaccagcactcttcaatactctccagcgccgccacttcttccagcgtattcgggaaacggacaaactgcgggaagacatcaatggcttttgcgaccagttcgccacgttcggctttcggcagcaagctggcttgcaggtaaagcggcagcgtgcgctggcagtccagtgcgttcagcatctctgccgccagggtgggcattccccagttaatcagttgcccggcggtcatcagggcgttaacgtcgcgtccctgacacagaccgcgccactgcgcgagagcactttcgctacgaccatcgaaccagttcagccaccacagagtggcgttcagcggataatcgcgcagcagtttctcgcgctgcacacgcgcgttgtcctgacgaccacttaacaccagcagcagattatgcaggcaaagcacttcctgattggttgggcaggcgcgaagactttgttggcaaaaatccagaccagcgtcgaagttaccattacgcgccgccagtcgtgccaggccataatagccaccggctttgctgttgccgctccagaccgcacgccagaaatcctcttcggcttgttgatattgtccctgacgttcgtaagcactggcgcgaatcaaactcgcctgtccgcactgcggatttttgttcagcgcatgtgcgcgtttcagagcctgagtggcatacgccaccgcttgcgggaaatctgcgcggttatattccagcatcgccagcgccaggttacagcgataatccagcgggtccagcgccacgccgcgcaggtagtaatcgaacggactacggctggcgtgatgatattgctccagatgctgaccgataaaccaggcttcatctgtactggtaatgtcttgtgctgccagtggcgctttggcgacgtccggtaacggcaacgcttgcggctgatgttcctgataactcagtacaatattgccgtcggcatcggagagctcaatggtcagcctttcaggattgataccgtgcaacacgccctggatggcggtcgcaggcatcagtgccacggcatcatcaagtaacgcgttgcatttaccgatttcgcggatcgccaggcggtatccgttcaacggagagatggcatacagcccccactcaatcccccgcttactacgctggagttttatcaccgcatcgcgggaggcattttgcaccatgcccaaagaatgataaggcaggaaatactgctcaaaacgcttctcttcgtaagcatcaagccaggtaaaatcgggctggttatcggcaaaaataccggtcatcagttcgatatacgggccgttattgtcggtcagactcttatcccacgcctggccaaattcactgtgtccccaactccactgttttttacctggcgcaatatggtggttggcaacgtgcagcaaaccgccatcttcatcgtgacaccacgcgccgacaaaatcgtactggcttttttcggccatataactggttggaacaggcacatttttatagcgagaaatgtccactccagcggagtagtccactttgtagtaagtgccggtagcgatggggaaagcggagacggcccgtttgccgtgatcaaacaccgccgttacatccggcgggaagacgctctgatgcccttccccccctttcactgccgggttggcccaccacaagaaatgacgcggcgtggcgttcccgttatagacgcggctggcgatttccagcgccgcccggtcagggcgcagggtgaaacctgtcatcacctgtaaaccatgcatcggctccgtttcgcctacccacaccgtctgtgcaccgtcttcatgggcttcgagggtgaaatcaacgggcataaaggtggtcgggcgatgatgttgcggccagttaaactcaatcccaccggaaatccacggccccagcagccccaccagcgcaggtttaatgacttcattgtgataaacaaaatcgcgctgtttcactttatcccacgcgcgatgcacccgaccgcccagttccggcaggatcatcactttgatgtagtcgttttccagccacaccgcctgccaggatttcagggttttctgctcgctcagcgtatcggtcacgccgtagggataaaccgcgccggagcttccctgataaacgcgattttccaggaacatgggatgtatatcctgcggcccggtttcataggtcgggatctcaacgcgctcttgccacacttttactggagtcatggtgccctcaatattaacaagacatactgaattaaaagatttgtggcagtgtattgaacaatctggcaatgttttcgcggaataatcacgcaattaactaaacaaggtttagtgaagatgagagcctgcattaataatcaacagattcgccaccataacaaatgcgtgattctggaactgctgtaccggcaaaagcgcgccaataaaagtacgctggcccggctggcgcaaattagcattccggcagtcagtaatattttgcaggaactggaaagcgaaaaacgggtggtgaatattgacgatgaaagccagacgcgcgggcatagtagcggtacatggctgattgcgccggaaggtgactggacgctgtgcctgaacgtgacgcccaccagtattgagtgtcaggttgctaatgcttgtttaagtccgaaaggtgaatttgagtatttacagattgatgcaccgacgccgcaggcgctgctgtccgaaatcgaaaaatgctggcatcgccaccgtaaattgtggccggaccataccatcaacctggcgttggcaatccacggtcaggttgatcctgtgaccggcgtgagccaaaccatgccgcaagcgccgtggacaacgccggtggaggtgaaatatctgctggaagagaagctcggcattcgggtgatggtcgataatgactgcgtgatgctggcgctggcggagaaatggcaaaataatagccaggaacgggatttctgcgtgatcaacgttgattacggcattggcagcagcttcgtgattaacgagcaaatttatcgcggcagtttgtatggtagcggacagattggtcacaccatcgttaatccggatggcgtcgtctgcgactgtggacgttatggctgcctggaaactgtcgccagcttaagcgcattaaaaaaacaggcgcgggtatggctaaaaagtcaaccggttagtactcaacttgatcctgaaaaactgactacagcgcagttaatcgctgcctggcaaagtggagaaccgtggatcaccagctgggttgatcgctctgccaatgccattggtttgagtctgtataacttcctcaacatcctcaatattaatcagatttggttgtacggtcgcagttgtgcctttggtgagaactggcttaatactattattcgccagacaggatttaacccgttcgaccgcgacgaaggaccgagcgtgaaagcgacgcaaattggctttgggcaattaagccgcgcacaacaggtgctgggaattggctatttgtatgttgaggcgcagttacgacagatttgatggcgcgataacgtagaaaggcttcccgaaggaagccttgatgatcataaacgaaaaattgcctgatgcgctacgcttatcaggcctacacggagattgcaatatattgaatttgcaaagttttgtaggccggataaggcgttcacgccgcatccggcatgaacaacgagcacattgacagcaaatcaccgtttcgcttatgcgtaaaccgggtaacgtgcgcagatgtcgagaactttacctttgatgcgctcgataacggcttcatcattgatgctgtccagcacgtcacacatccagccagccagttctttcgcttcggcttctttaaagccgcgacgggtaatcgccggagtacctacacgaataccggaggtcacaaacgggctcttcggatcgttcggtacgctgtttttgttgacggtgatgttagcacggcccagagcggcgtctgcttctttaccggtcaggtttttatcaaccagatcaaccaggaacaggtggttatcagtgccgccggaaaccactttgtagccgcgctcgaggaacacttctaccatcgctttagcgtttttagcgacctgctgctggtaagttttgaactcaggctccatcgcttctttcagagcaaccgctttaccggcgattacgtgcatcaacggaccgccctgaccaccagggaaaacggcagagttcagttttttgtacagctcttcgctaccacctttcgccaggatcaggccgccgcgcggacccgccagggttttgtgagtggtggtagtaacaacgtgagcatgaggaaccgggttcgggtagacgccagcagcaaccaggcccgcaacgtgcgccatatcaacgaacaggtaagcaccgatgctgtcagcgatttcacgcattttcgcccagtccaccacgccggaatatgcagagaaaccaccgataatcattttcggcttgtgttctttggcttgtttttccagatcggcgtagtcgatatgaccggtagcatcgataccgtaaggaacgatgttgtacagtttaccggagaagttaaccggagaaccgtgagtcaggtgaccgccatgcgccaggttcatacccagaacggtatcacctggttccagcagcgcggtgtagaccgcaaagttagcctgggagccggagtgcggctggacgttagcgtagtcagcgccgaacagttctttcgcacgatcgatcgccagttgttcaacgatatcaacatactcgcaaccgccgtagtagcgtttgcccggataaccttcagcatatttgttggtcagctgagaaccctgcgcctgcattacgcgcgggctggtgtagttttcggaggcgatcagttcgatgtgctcttcctgacgtactttttcctgctccatagcctgccacagttcggcatcataatcggcaatgttcatttcacgctttaacatccgcatctcctgactcagctaacaataaaatttttggcctttataggcggtcctgttggacaacggcgaacagtataaccgaatcattgtgcgataacaggtcttgacaaaggaatttacgcaaacgattaccttcaggctacgcaaggctttggagaataaagagcttgcaaccggaaacggatttcttttcaggtttgtgatgcaaatttttcacttcatcacattctttctgaaaaacaccaaagaaccatttacattgcagggctattttttataagatgcatttgagatacatcaattaagatgcaaaaaaaggaagaccatatgcttgacgctcaaaccatcgctacagtaaaagccaccatccctttactggtggaaacggggccaaagttaaccgcccatttctacgaccgtatgtttactcataacccagaactcaaagaaatttttaacatgagtaaccagcgtaatggcgatcaacgtgaagccctgtttaacgctattgccgcctacgccagtaatattgaaaacctgcctgcgctgctgccagcggtagaaaaaatcgcgcagaagcacaccagcttccagatcaaaccggaacagtacaacatcgtcggtgaacacctgttggcaacgctggacgaaatgttcagcccggggcaggaagtgctggacgcgtggggtaaagcctatggtgtactggctaatgtatttatcaatcgcgaggcggaaatctataacgaaaacgccagcaaagccggtggttgggaaggtactcgcgatttccgcattgtggctaaaacaccgcgcagcgcgcttatcaccagcttcgaactggagccggtcgacggtggcgcagtggcagaataccgtccggggcaatatctcggcgtctggctgaagccggaaggtttcccacatcaggaaattcgtcagtactctttgactcgcaaaccggatggcaaaggctatcgtattgcggtgaaacgcgaagagggtgggcaggtatccaactggttgcacaatcacgccaatgttggcgatgtcgtgaaactggtcgctccggcaggtgatttctttatggctgtcgcagatgacacaccagtgacgttaatctctgccggtgttggtcaaacgccaatgctggcaatgctcgacacgctggcaaaagcaggccacacagcacaagtgaactggttccatgcggcagaaaatggcgatgttcacgcctttgccgatgaagttaaggaactggggcagagtctgccgcgctttaccgcgcacacctggtatcgtcagccgagcgaagccgatcgcgctaaaggtcagtttgatagcgaaggtctgatggatttgagcaaactggaaggtgcgttcagcgatccgacaatgcagttctatctctgcggcccggttggcttcatgcagtttaccgcgaaacagttagtggatctgggcgtgaagcaggaaaacattcattacgaatgctttggcccgcataaggtgctgtaatttgatgttgccggatggaaacatccggcaacccttgacgcggtttaaattgccgcgtcgtcctcttcaccggtacggatgcgaatgacccgtgccacgtcaaagacgaagattttaccgtcaccgattttgccggtttgcgccgtgcgaataatggtatcgacacaggtatcgacaatgtcgtccggtacgacaatctcaattttcactttcggcagaaaatccaccatatactccgcgccgcggtacagctcggtatggcctttctggcgaccaaagcctttcacttcggtcaccgtcatgccggtaataccgacttcggccagtgcttcgcggacatcgtccagcttgaagggttttataatcgcatcaatctttttcatgctattccttgaaaaggtcgcctgtcttttgatctgctaaacgtaacacataacgccaattcattccttgaaatcgtttgcatccagctcgtgtcgggaaagcagtttataaaattctgtccggttgcgccccgccattctcgccgcgtgggtgacgttgcctttggtgatttgcagcagcttacgcaaatagttgagttcaaactgattacgtgcctcaacaaaggttggcagcgccgtattttcaccctccagcgcctgctccaccagcgcatcactaatcaccggagaactggtcagcgccacgcactgttcaatcacgttgaccaactggcgcacattacccggccagctcgcggtcatcaggcgtttcatcgcatcggtagagaacgcgcggacaaacggtttatgtcgctctgccgcctggcgcaacaggtgatttgccagtagcggaatgtcttctgtgcgctccgccagtgccggaattttcaggctgacaacgttgaggcggtaatagagatcttcgcggaattccccgcgcgccatcgcttttggcagatcacggtgagtggcagaaataatccgcacattgatatcaatatcgcggttactgcccagcgggcgcactttacgctcctgcaacacgcgcagcagtttgacctgtaacggcgcaggcatatcgccaatttcatcgagaaatagcgttccgccttccgccgcctggaataaaccttcgcgattgctgacagcgccagtaaacgcgccacgcgcatgaccaaacagctcgctctccagcaattgctcgggcaatgcgccacagttaatagcaataaatggtttgctgttgcgcgggctggcgttgtggatagcctgggcgaaaatctctttcccggtgccgctctgaccgttaatcaaaacgctgacgtcactttgcgccaccagccgcgcctgttccagcaaacgcagcatcagcgggctgcgggtgacaattgcctcgcgccagcgttcatcggtggctggcgcggattgctccagcgcatcgtcaattgcctgatatagcgcgtctttgtcgacaggcttggtgaggaaactaaaaacgccctgctgtgttgcagcaacggcatcgggaatagaaccatgcgcggtaagaataattaccggcattcccggctgcactttctggatttcagcaaacagctgcataccgtccatttcatccatccgcaggtcgctgatgactaaatctactttttcgcgattcagtacccgtaatccttcagcgccactttccgccgtgaccacactgtagccttcgctggtcaggcgcaggccaagcagtttcagcaatcccggatcgtcatcgaccaataataaatgcgcaggtttatggctcatcaggagtgacctcatgggtggatggcgcgggcttttcactctcgtgcggcgtatccgggctgaaatttccagccggtttgcgggtgctgagctggcgttcaatatcggtcaggttttccagcttgcgggtggtgagttccagttgctgctgtagaacgtgatgttgctggcgcaatgtatccagctcgctgtcgctggactgctggagtttactgtaacgttggcgctcttccgccagttgcagttgcagcgcctgaccatcgcgccagagttgatacagtgggcgaacctgtgccgggatctcggtacttaacgcttcaatacgcgcgaccagctggcggcgctcatacggcgtaattttggcgtcggcgagcaaaatcccttgtttaaaggtattttgccagctgccgtcgtcatattggcgagcttgctgacggctctgcgcaggcattaaacgatcagcacaatccatcgcccgcagccagtaaagcggattggtttcggtacttttaccttgcagcgcccagatgtcgctacattcagtagaaagatagtcagccagttgataaaccggaattttttcttctgctggcgtatcaatggctggcttattgtgattctgcacgcaacccagcaatgccagacatggcagccctgccagccacagccgtcggggcaataatcgttgaaaaatgtgtcgcatattcaccagacttaaagcctatcccagtgggcgtaattgttgcagacagtctggacatggacagcgcggagaaaccggagcgtacatatcgtacgtgaagatttcgagcactgcccggggccgaactgacaaataaaatagcctgataggataggctgttagcattatttcgtgtttttgctgctcggtaattcaatgcggaaacaaacgtcttgcccgctctcgtcgaccagatacagttccccttgcatacggcgaatacaatccctggcaatgcttaatcccagaccgctgcccttcaccgccccttttcgctggtggcttccctgaaaaaagggttcgaagatcatggcgcgttcctcttgcggaatgggcgtgcctgtattgatgacatcaatataaacccgcgcaccatgtaaactgctgcgaaggcaaatgttaccggattcagccccgtagtgcaccgcattggagtaaagattatccagtacgctcatcagcagcattggctccgccaggcaagctgttgctttgagatcgacgtcggtatgcatcattttagcccgtgcgggcaggctatgagcagaaaccactgtctccaccagcggtgctaactcaacattctccagttccaccgcactgtccgcctgtttacggttgtaatcaagcagttgttcgatcagtttttgcaaattgcggctgctgctatcaagaatgctcaccacctctttttgctctggcgtaagcggcccgacaacctggtcagccagtaattcagtgccctcgcgcatactcgccagtggcgtttttaattcatgagataaatgtcttaaaaattgatggcgttgggattccagccaactcaggcgctcacttaaccaaagaatacgttgcccaacgctgcgtaactcgctcggtccactgaagctgacgctattgcccagagaacgcccttcccccagacggttgatcatgcgctcgatatttttcaccggcccgataatcatccgcgtgaaaagcagtaccattaccagactcaccagaaatagcaccaggctttgccaaccaaaatattgcccacgttcggcgatttcacgctgaagctgctgcccacgagagaacaccactgtgcgcgtggcctgtaccatttcggtattggcactggcaaaggcttcaagacgtgcggcggcggcagcatcgggaccgctgttgttacactgaagttgagccagattgtgcaaatcctgacgtaatgcctggtagagtttatcgtccggcagcacgcctgcgtgggcatcgagcatttcgctgtaacgcttgcgctggctttgataaaccttcgccagggttgggtcgtccagcacgcaatactgacggtaactacgctccatctccagcgccgcgttggtcatcgcttcactgcgccgggcatcaataagcgtagtgcggttaaccagcgccgcctgatcgctaagcgcattcaggctttgccaggcttgccatgccagcaccaacaggggcagcagaatcagcaaaaatgccagcattaccagttgtcgtaaactgcggggaaaaacgggccagcgtttcaaggtgttactctcgtcagacgcgaatagcctgatgctaaccgaggggaagttcagatacaacaaagccgggaattacccggctttgttatggaataaggcggtgcctaactcgacgtttcgcccgatggttgatatagctacgctgatatcagaagttggacggcaggcaccttgttgtgcgtcattcgtattttatgtagcacgtcccgaaggggctgacataagtcggtgaatgagccactggttactattatgcagtaactgtgccaataaagaaaatagtttggtaacgtactgattatacgttgctttgaggggtttatgtctcctccgctgtttgaatgtaaatcagccactgtgtcgctaaaaagagacaacttaagataaacttattagataatattaaaatcaatgagttaagtgtcgccagaaagcgacacggcaaaccacccattgtcgtgatttacagacacaaaaaagctcccggagttgggagcttatgatagtggttggtgcttaatgccgcatccgggctgcaaaaccaatgggctgacgacttaccccaactgcttacgcgcattgcggaaaatgcgcatccatgggccatcctcgccccagttttccggatgccaggagttgctgacagtacggaaaacacgttccgggtgcggcatcataatggtgactcgaccactttcagtcgtgactgccgtaataccgttcggactaccgttcgggttagccgggtaggtttcagtgactttgccgaagttatcgacatagcgcagtgccaccagccctttgctttccagtgccgccagatgcgccgcatcacgcacttccacgcgcccttcaccatgagagacagcaatcggcatttggctgcccaccatcccctgcaacagcagagacgggctttgggttacttcaaccaggctgaaacgcgcttcaaagcgatcggaggtattgcgcacaaaacgtggccacaactcactacctgggatcagttcacgcagattagacatcatctggcaaccgttacatacccccagcgccagcgtttgcggacggtggaagaaggttgcaaactcatcgcgtacacggtcattgaacaggatactcttcgcccaaccttcaccggcacccagcacatcaccgtaggagaaaccaccgcacgcgaccagggcgtggaaatcttccaggcccgtgcgtccggtcagcaggtcactcatatgcacgtcgatagcatcaaagcctgcacggtggaaagctgccgccatttcaacatggctgttcacgccctgctcacgcagtacggcaactttcggacgtgcgccagtggcaatatacggtgctgccacatcttcgttgatatcgaagctcagttttacattcaggcccggatcggcgtcgttagatttcgcctgatgctcctgatcggcacactccgggttgtcacgcaggcgctgcatctgccaggtagtttctgcccaccagacacgcaacgtggtgcggctttcgctgaatacagtctgcccgttggcggtaatcacaaaacggtcaccggaaaccgcctgccctacataatggacacaatcagcaagcccatgctgtgccagtacggactcgaccgcttcacggtcagcggcacgaacctgaatcaccgcacccagttcttcgttaaacaacgccgccaggcgatcgtcacccagagtggcgatatccgcgtcaatgccacaatgaccagcaaaggccatttccgccagcgttaccagcaggccgccatcagagcggtcgtgatacgccagcagcttacgctgtgcaaccagcgcctgaatcgcgtcatagaagcctttcagttgcgcgacatcgcgtacatctgccggtttgtcgccaagctgacgataaacctgcgccagcgccgttgcgcccagcgcgttattgcctttgcccaaatcaatcagcagcagtgcgttatcttcggtagaaagctgcggcgtgatggtgtgacgtacatcttccacgcgggcaaatgcagaaatcaccaggctcagcgggctcgtcatttcgcgctcttcgttaccttcctgccagcgggttttcatgctcatggagtctttacccaccgggatcgtcaggcccagcgccggacaaagctcttcgcccacggctttaacggcttcatacaggcccgcatcttcaccagggtggcctgccgccgccatccagttggcggaaagtttgatgcgtttgatatcgccaatttgtgttgcggcgatgttggttaacgcttcaccgaccgccagacgggcagaggcggcgaaatccagcagcgcaaccggcgcacgctcgccaatcgccatcgcttcaccgtagtagctgtcgaggctggcggtagtgaccgcgcagttagcgaccggcacctgccacggccccaccatctgatcgcgcgctaccatgccggttacgctgcggtcgccaatggtcaccaggaaggttttttccgccacagtcggcagatgcagcacacgtttcaccgcgtctgcaatggtgatcccttcacgggccagcgcgtcgcctttcgctttcagcgtttgtacatcgcgggtcatcttcggcgttttaccaagcaggacgtccagcggcagatcgatcggctgattatcaaaatgacgatcgtgcagagaaagatgcagttcttcggtcgcttcaccaatcaccgcgtagggtgcgcgctcacgcttacacagttcgtcaaacagcggtaattgatcggcagcaaccgccagcacgtagcgttcctgggattcgttacaccagatttccagcgggctcatgcccggttcgtcgcttagaatctcgcgcagttcaaatttaccgccgcgcccgccgtcgctcaccagttccggcatggcgttagaaagaccgccagcgccaacgtcgtggataaacaggattgggttggcatcaccaagctgccagcaacggtcgatcacttcctggcagcgacgctccatctccgggttgtcgcgctgtacggaagcaaagtcgaggtcggcatcagactgaccagacgccatagaagacgctgcaccaccgccaagaccgatgttcattgccgggccgccgagaacgaccagcttcgcaccgacgttgatctcgcctttttgtacgtgatcggcgcgaatgttgccgatcccgcccgccagcatgatcggtttgtgataaccgcgcagctcttcgccgttgtggctgttcactttttcttcataagtacggaagtagccgttcagtgccggacgaccaaattcgttgttaaacgccgcgccgcccagcgggccttcggtcatgatgtccagcgcggtgacaatgcgctcaggcttaccgaaatcttcttcccacggctgttcgaagccaggaattcgcaggttggaaacggagaaaccaaccagacccgctttcggctttgcgccgcgcccggtggcaccttcatcgcggatttcaccgccggaaccggtcgccgcgcccggccacggagaaatcgccgtcgggtggttgtgagtttcgactttcatcagaatatgcgccggttcctgatggaaatcgtagcggcccgtttcgtggtcagcaaagtagcggcccacttcagaaccttccattacggcggcgttatctttataagcagagagaacgtgatctggcgtggtttcgaaagtatttttgatcatcttgaacaggcttttcggctgctgttcaccatcgataacccagtcggcgttaaaaattttgtggcggcagtgctcggagttcgcctgggcaaacatatacagttcgatgtcgttcgggttacgaccaagctttgtgaaagcatcctgcagatagtcaatttcatcttccgccagagccaagccaagacgcaggttagcgtcgatcagcgcctgacggccctgccccagcaaatcaacgctggtaaccggagtcggttgatggtgggcaaacaactgctctgcatcatctaaagcaaaaaagaccgtttccatcatgcggtcgtgcagttcagcggtaacctgctgccattgttcattggtcagcgtaccggcttctatatagtaagcaacgccgcgctcaaggcggtttacctgttgtagcccgcagttatgggcaatatcggtcgctttgctagaccagggagagatggtgccaggacgcggggtcaccagcaggagtttgccttgcggggcgtggctggcgagtgccgggccatatttcagcaggcgttcaagttgtgcgtgctcatcatcgtttaacggcgcattgaggtcagcaaaatggacatactcggcgtaaatattgtgaaccgggagcctggcagcctgaaaacgtgccagcagtttgttgattcggaatgcgctcagtgcagggctaccacgcagaatttccatcataagtctctcgtcttctaagctttcggtgtacccaagggggggaaacgggcgtcattataaagaatctgatgcgctgacgaaaccgtttgcgtggaaataaaatcaccatcgtgaattagcaacgcgtgccgccaatggctgtaataagttgccatctggcgcaggtttacgcaaaatgccgctcatttatgagtaaacctttcactattattacgttttttcaagctgggacgcgcacgacacagagaattaactaattgaaaaaattaaagattaattatctgttcatcggcattctggcactgctgctcgcggtcgctctctggccatccattccctggtttggtaaagccgacaaccgtatcgccgccattcaagcgcggggagagttgcgtgtgagcaccattcatactcccctgacttataacgaaatcaacgggaaaccttttggcctggattacgaactggcgaaacagtttgccgattacctcggcgtaaaactgaaagtgaccgtgcggcagaatatcagccagctgtttgacgaccttgataatggtaacgccgacctgctggcggcaggacttgtctataacagtgagcgggtaaaaaattatcagcctggccctacctattattccgtgagtcaacaactggtttataaagtgggtcagtatcgcccacgtacgctgggcaacctgacggcggagcaactcaccgttgcaccgggtcatgtggtggttaacgatctccagaccctgaaagaaacaaaattcccggaattaagctggaaggtagacgacaaaaaaggctctgcggaattaatggaagatgtcatcgaaggaaaactcgattacaccattgctgattctgtcgccatcagcctgtttcagcgcgttcacccggagctcgccgtagcgctcgatatcaccgatgaacaaccggtgacttggtttagcccgttagatggcgataataccctttccgccgccctgctcgacttcttcaacgaaatgaatgaagacggtacgctggcacgcattgaagagaaatacctggggcatggcgatgattttgattacgtcgatacgcgcacatttttacgcgccgtcgatgcggtactgccgcagttaaagcccctgtttgagaaatacgccgaagaaattgactggcgtttgctggccgctattgcttatcaggaaagccactgggatgcacaggccactagtccgacgggtgtgcgcggcatgatgatgttaaccaaaaataccgcgcaaagcctcggcattacggatcgtaccgatgccgaacagagcatcagcggtggcgtgcgttatttgcaggatatgatgagtaaagtgccggaaagtgtgccggagaacgagcggatctggtttgccctcgctgcgtacaatatgggctatgcgcatatgctggatgcccgcgccctgacggcaaaaaccaaagggaatcctgacagttgggctgacgtaaaacagcgtctgcctttacttagccagaaaccctattacagcaagctgacttacggctacgctcgtggacatgaagcctacgcttatgtcgaaaatattcgtaagtatcagattagcctggtgggttatctgcaagagaaagagaagcaggctacagaagcggcgatgcaactggcgcaggattatccggcggtaagccctacggagttgggcaaagagaaatttccttttctcagctttctttcccagagcagtagtaactatttgacccattctccctctctgctgttttccaggaaagggagtgaagagaaacaaaattaatccgtgctggattgcgcttttttctgcgctttaatttcctggcggcgcatgcgaaagaagtcactgagcaacgccgcgcactcatccgccagtattccttccgtaatttccactcggtgattcatacccggatgatgcagcacatccattaaagatcccgcagcgccagttttcgcgtcacgcgcaccaaagaccacgcgaccaatgcgactgtggatcatcgctccggcacacattacacatggttcaagcgtgacatacaacgtggcgtcgatcagacgataattttgcatcaccagaccaccctgccgcagggccatgatttctgcatgtgcggtgggatcatggcgaccaatcgggcggttccagccttcgccgattacccgattgttatgcactaataccgcgccgaccggcacttcccgctcatcccaggcacgtttcgccagcgtcagcgcgtgacgcatccagtattcgtggctaaattcgacttcagacaaaaagaaaactccggttataaaagcgcggcgcattatacacggacgctatgctttactttattccagttgctggagttcaccgcgcggggttactcgccaacgatgctgacagaaataaagcagcggattgtcctgattactgtcgctatagccactgtacagccgcagcggagtgccgattttgcgctccagttgtgcgaccttttcatgtcccagacaacgcatcgtcaatacccaaccaccatagccacgctgaatttggctggcgataagattaacccgcggcagccagggcgtatcgaaataaaccgcttcaaccagcggctgcggagagccggtaatcaaccagatatcagcatcggaacttaacaggtaggtggttaatcgctcctgaaccagcggaaaggcggtaacattgtcgcgaaaccagcgcacgaaatcggcctgcaacgtctgtaaacgtgcttcgctgtgaccaaaagtgcacccccacagaagcagactcatcggccagcgtgccgcacgaccttttatcaataacgcaatggctataatcggtaacaacggcaggacaagtaacgcattcagcggttggcgacgtagtaaatagcgcagaaaactgccgaacatatcctgctgatgcaatgttccatctaagtcaaaaaacaccacacgacgctcgtgagttgccaaaccatattcctctggactgaaacatcctgattaattttcgctactacatagcctaacagatagatcatcacttttccggcaacaatcgaccgcatcatggctaactggaatttttaattcatggcaattagcggcaatggaatataaaattcactcgcgtgtgtctcatattgcctgttgtcgccactatttcatcgcgaggaaagatatgaacggcttacttcgtatccgtcagcgttaccaggggcttgcccagagtgataaaaaactggcggattatctgctgctacaacctgatacggcgcgccatttaagctctcagcaactggccaacgaagccggagtcagtcagtccagcgtcgtgaagttcgcgcaaaaactcggctataaaggttttccggcgcttaagttggcgttgagtgaagcgctggcaagccagccggaaagtccctccgtgcccattcataaccaaatccgcggtgatgatccgttacggctggtcggcgaaaaactgattaaagaaaatactgccgctatgtacgcaacgctaaacgttaatagtgaagagaaactgcatgaatgcgtaacaatgttgcgctctgcgcggcggataattctgaccggtattggcgctagcggtctggtggcgcaaaactttgcctggaagctgatgaagattggcttcaatgctgccgcagtgcgcgatatgcatgcgctactcgcaacagtacaggcgagctcccctgacgatctgttattagccatttcctacaccggtgtacgacgcgagttaaacctggcggcagatgagatgctgcgagtgggcggaaaagtgctggcgattaccggctttactccgaatgccctgcaacagcgtgcttctcattgcctgtataccattgccgaagaacaagcgacaaacagtgctagtatctctgcttgtcacgctcagggaatgttaacggatttgctgttcattgcgctgattcagcaggatctggaactggcaccagaacgtattcgtcatagtgaagcgctggtgaaaaaactggtctgagtaaagaatgcgcgtataatgcccgcccggtttgtgttgttttgagagtttccttatggcgttgttaatcactaaaaaatgcatcaattgtgatatgtgtgaacccgaatgcccgaatgaggcgattagtatgggagatcatatctacgagattaacagcgataagtgtaccgaatgcgtagggcactacgagacaccaacctgccagaaggtgtgcccgatccccaatactattgtgaaagatccggcgcatgtcgagacagaagaacagttgtgggataaatttgtgctgatgcaccacgcggataaaatttaatattctactctggaagtagagtattaattatattactgggaagccttaacgccattatatttatttaattgatgacattagcataatcattcactaagttaatttatatagtatctgcccagacacttatttatagttattaaaggtgcgtccgactggttcaccggacgcaccttaagtacgtttccttgtgttataagaacagaaggatcagctgtaaaacagcaatgatgattttgatgacccgtttaatcaggtatcggcaatcagtcattcgtttttccttaaacaaggaatgcagccattcagattagcccttacatctccccaaaactgaacgtgcgagttattgagggtgcatgctgcactccacaccagagctttgacgacaccactcgtttcaatgggggaattctgtggcatggtgtaaagcacagcaaaatcttcaataacgaagccaattttaatgtacttacgaattggcggtcacgttaatctttccatcaatattgctttcttcgtaaaggctcgagtttttatgctaaagattgcaagttgcttgtaaaagataagtacactgatccataatcgctgttgttgagggtgcatgctgcacaaaattaaagttaaaaagtaaaacccccgttccttaccagttcgggggttttactttttaaagagaacggtattatttttaactttcaataattaccgtggcacaagcatagtgccgctcatctgccagcgttacatgcatatttgcaacgcccagcttttccgccagttttaatgcctcgccccatagccgtagccgtggtttgccgagctcatcattgaatacttcaaattgattaaacgccagaccattgcggatcccggtgccaaacgcttttgctgcggcttctttcacagcaaaacgcttcgccagaaaacgcaccggctggtggtgcgttttccagatagcccattcgttatcgcttaatacgcggcgtgccaggcgatcaccggatcgggcgatcaccgcttcgatgcgagcgatctccacaatatccgtgcctaaacctaatattgccattagccacgcgcttccagcatcagacgcttcatttctgccaccgcatctttcagtccggtcatcactgcacgaccaataatggcatgaccgatattcagttcatgcatctcagggatggcggcaatggctttcacgttgtgataggtcagaccgtgtccggcgttaactttcagaccgaggcttgcggcaaaggtcgcggctttggcgatacgcgccagctcttgcgcctgttcggcgtcagttttggcatcagcatagcaaccggtgtggatctcgataaacggtgcgccaacctctgccgcagctttgatctgctcttcatcggcgtcaataaacagagaaacctgaatcccggcatctgccagacgtttgcaggcatcgcgcattttgtcacgctgccctgcgacatccaggccgccttcggttgttacttcctgacgcttttccggtaccaggcagcaaaaatgtggcttcgtctcaacggcgatcgccagcatctcttcggtcaccgccatctccagattcatgcgggtatccagcgtctgacgcaggatgcgcacgtcgcggtcagtaatgtgacggcgatcttcacgtaaatgcacggtaatgccgtccgctcccgcctgctcggcaataaacgcggcctgcaccggatccgggtaagcggtaccgcgcgcgttgcgcagcgtagcgatatggtcaatgttgacgcctaacagtaattcagccatgacaatcctcatcattcataatgtgttttcaccgttcgcttaggcataaactgccggaacagttccctgctctttaaaggtttaccgccaagatacggcttaagcgccatgcgggtaaagcgtttcgcggcgcgcagtgtgtctgcgtcaggaaattcccgtgcgtttaacgcttttaactgccttccggtgaacgttttattgtcgataacgacgcttgcgataaaccctttttcttcgcgataacgatacgtcatggtgtcatctaccggctcgccgctacccgcacaatgggtaaaattgacgccataacccagatgcccgagcagtgccagttcaaagcggcgcagcgcgggttctggcgtaccagtgacccctgcaagagactgaatgcagtgcaagtaatcgaaaaaaagttcagagaagcgcgtctcgtattccagtacgcgggagagaagttcgttgatgtacagaccgctgtaaagcgtgataccgcttaatggcagcgccaggctgacggcttcagcactgcgcagcgttttgacttcgccacgcccgccaaaacgtagcaagagaggggtgaaaggctgtaatgcacctttcagggtagagcgtttagagcgtgcgcctttggcaaccagacgcacgcgcccgctttcctccgtgaagacgtccagcatcaggctggtttcgctccacgggcgactatgcaggacaaatgcgcgctgccagccttccatcggagttactcttaaagatcgtcaacgtaaccgagactgcgcagtgcgcgttcgtcgtcggcccaaccggatttcacttttacccacagttcaaggtgaacaggcgcttcgaacatttcctgcatgtctttacgcgcttcaatcccgatggttttgatcttggcccctttgttgccaatgaccatcttcttctgcccttcacgctcaacgagaatcaaaccgttgatgtcataaccaccgcgttcgttagagacgaaacgttcgatctccacggtcacggagtacggcagttcagcgccgaggaaacgcatcagtttttcgcggatgatttcagacgccataaaacgctgactgcgatcggtgatgtaatcttccgggaagtgatgagtcgcttcaggtagatgcttacgcacgattgccgcaatagtgtcaacattcagcccggtttcggcagagattggcacgatatcgaggaagttcatctggcttgccaggaactgcaggtgcggcagcagatcggctttctcctgcacgttgtccactttgttcaccgcgaggattaccggcgctttgccttcgcgcagtttgttgagcaccatttcgtcgtccggcgtccagcgggtgccttcaacgacaaaaatcaccagctcaacatcgccaatagagctgctcgccgctttgttcatcaggcggttaatggcgcgtttttcttccatatgcaggcccggtgtatcgacgtagatcgcctgatacgcgccttcagtatggatccccacaatgcggtgacgagttgtctgcgccttgcgggaagtgatggagattttctgccccagcagtttgttcaacaatgtggatttgccaacgttcggacgtccgacgatggcaataaatccgcagtaacttttatcgatgctcattccagctccagttttttcaacgcctgttcggcggcagcctgctcagccttacgacggctactacctgtgccaaccaccggttcactcaggccgctgacctggcagtggatagtaaattcctgatcgtgcgcttcgccacgtacctggactaccagataagtcggcagcggcagatggcgaccctgcaaatattcttgcaagcgcgttttcggatctttttgtttatcgcctgggctaatttcgtccaaacgagtttgataccagttgaggattaatttctcgacggtttgaatatcactgtcgaggaatacgccaccaattaatgcttcgacggtgtcggcgagaatactctcacgacgaaatccaccgcttttaagttcacctggccctaaacgtaagcactcgcctaactcaaattcgcgcgccagttccgccagcgtattgccacggaccagcgtggcgcgcatccggctcatatcgccttcatccacacgagggaaacggtgataaagcgcattggcgataacgtagctcagaatagagtcgcctaaaaattctaaacgctcgttatgtttactgctggcactacgatgagttaatgcctgctgcaacagttcctgatgattaaaagtgtagcccagcttccgttgaagccgattaattacgatggggttcatgcgataccaataaataaatgcgtcaacaattcagcacacgaaacagacctgatatacatggttctgctaactgcttcgctgcagtttcagtttaccggtatatggggaccaacgctgtttcgtgtgccgtggcaacctggaggtgccaaccttaaacttcgggggaatattctatacacaacgacgggggatgtcgttagccacgggagatttatctcataaataattcacgttgtcgccataacggcgacaacgtgaacgaagatggctattaatggatgccgccaatgcgacttaagcgcagaccagtcggccattcgccttcttgcttatcgaagctcatccagatagccgttgcccgaccgaccagattcgcttccggcacaaagccccagtaacggctgtccgcgctgttgtcgcggttgtcgcccatcatgaagtattgtcccggaggaacaatccaggttgccagttgttgccctggctgctggtaatacatccccacctgatcctgcgcaatcggcactgtcagaatgcggtgcgtcacatcacccagtgtctctttacgctcggaaagacgaattccattttctttggtttcgtttttcggcacttcaaagaatccgctggtcgcttccccaccattacggcgactgaaggtctgaacgaaatcgctcggttccacgttactgtaggtgaccggcagcgcgttttcacacgcctggccggaactgcatcccggttgaatcgtcagctctttactgaccggatcgtaagtgactttatcgcccggtaaacccaccgcgcgcttgatgtaatcaagctttggatcttccggatatttaaagaccacgatatcgccgcgtttcggatgaccggtttcgatcagcgttttctggtagataggatctttaatgccataagcaaacttctctaccagaataaaatcaccaattaacagagtcggcatcatgctaccactcgggatctggaacggttcataaataaagctacgcacaatcaatacgatagccagtaccggaaaaacagaagcaccggtttccagccagccaggcttcggcgcaacctttttcaacgttgctttatccagactgtccccggcagccgcctgcgccgctgcctgacgttcccgccgtttaggtgcgaaaaagaatttatccacgcaccataaaatgcccgtcaccagtgtggcaatcaccagaatcagggcaaacatattcgccatgccaactcctaagggttatttgttgtctttgccgacgtgcagaatggcgaggaacgcttcctgcggcagctcgacgttaccgatctgcttcatgcgtttcttaccttctttctgcttctgcagcagctttttcttacggctgatatcgccgccataacatttagccagtacgtttttacgcagctgtttcacggtggatcgcgcaatgatgtgcgtaccaatcgctgcctgaatggcgatatcaaactgctggcgtgggatcagatctttcatcttctccaccaactcgcgaccgcggttttggctattatcacggtgggtgatcaacgccagcgcatcaacacgttcaccgttgattaatacgtctacacgtaccatgtcggacgcctggaagcgcttgaagttgtaatccagagacgcataaccacggctggtagatttcaggcgatcgaagaagtcgagcaccacttccgccatcgggatctcgtacgtcagcgccacctgattaccgtggtaaaccatattggtctgcacgccgcgtttttctacgcacaacgtaataacgttgccgagatatgcctgcggcagcagcatgtgacactctgcaatcggctcgcgcagttcgtagatgttatttaccgcaggcagcttggatgggctgtcgacgtagataacttctctactcgtggtttcaacttcatacactacggtcggcgcagtggtgatcagatccagatcgtattcacgttccagacgttcctggatgatctccatgtgcagcaggccgaggaagccgcagcggaaaccaaagcccagcgcgctggagctttccggctcatagaacagactggcatcgttcaggctgagtttacccagcgcgtcacggaaggcttcatagtcgtcggaacttaccgggaacagaccggcgtatacctgcggtttgactttcttaaagccaggcagcgccttttctgccggattacgcgccagcgttaaggtatcgccgactggagcgccgtggatatctttaatcgcacatacgagccagcctacttcgccacatttcagttcagtgcggtcaacctgtttcggcgtgaagatgcccagacggtcggcgttataggtctgcccggtactcatgactttcactttgtcgcccttacgcagggtgccgtttttaatacggataagactaacaacgcccaggtagttgtcgaaccaactgtcgataattagtgcctgcaacgggccttccggatcgccttccggcggcggaatgtcgcgcaccagacgttcgagaacgtcctgcacaccaacgccggttttcgcactacagcgcaccgcgtcggtggcgtcgatgccgacgatatcttcaatttcttccgccacgcgttcaggatcggctgccggcaggtcaatcttgttcagtaccggcacaacttcgagatccatttccatggcggtgtagcagtttgccagggtttgcgcttctacgccctgcccggcgtcgaccaccagcaatgcaccttcacaggcagccaggctacgggaaacttcataggagaagtctacgtggcccggggtgtcgataaagttaagctgataggtttcgccgtcagacgctttgtagtccagcgtcacgctttgcgctttgatggtaatgccacgctcacgctcaagatccatggaatcgagaacctgcgcctccatttcacggtcagacaggccaccgcagatctggataatacggtcagacagcgtgcttttaccgtggtcaatgtgagctatgatgctaaagttacgtatattcttcataaagtatgattattgtgccttaatgcccggttaaccaggcttttagaagtcgctgttctgagcttaacgtctgtattaatagaaacgccgcattctacactacaacattgaggcgaggaaatgttcataccgtatggattgtggtatctggaaacgtcctcgcatttgttatgcaaaatgcaacaaagccagtgaaatcactggctcgcgtcttcgctagatgtttcaaatcgcacaaggccaggcggcaatgccacgcttaagatgatcggttgccattctgcccgggcagcaaacttacggctgtagccgcgcgcaatcaggaacccgccaataccaccgaggatcgcaccacataatgctgcgacgtcagaagcaaagagtagctgaaataggctagcgataaggaataatcccaccagcgggctcatataaaccagtaatgcggagctaagcaggctgccttcggcgatccccaattccactttttgccccggcactaacggctcatcacagggtacgacaatggtatgcgtggtttgcgggccaagtttatttaacacgcggctaccgcaaccggcgcgactagcgcagctgctgcaactagctttaacatcacaactgaccagcgcctgcccgttttgccaggagacgacggtagcccactctttgatcattgcgctgccccgaacttaatattctcggcaatgcgtttcgccgtttgcggcggcagttcaccgacaatggtgatttcggcgttatcacgtacgcttgtactgacggttctgcgtccggtgcgcaacatctgatcggtgctgcttggcgtagcgcggttaacgtttacgctgaagctgaataatccgtcggaatagagacgactttcgataggcatgttgtccatcgtcggtagcggacgtcgactactggaaacttcgctaaaaccctgtggcaaccaggttggcgtccagctgaatttagctttttcacctacaggaacagaaagcaacggcggcaaatttgccttcgccagcgtctgcatactgctgctgatatcctgattgacgttaaaagcaatcacgcgaaattgttccagcgtttcaccatcgcgatcaaggagatcaacccgcatcggtaatttgctttcggtgtccatccacacgatgtagctgtagcgtgtaccatctcgggcaaccacgcgaatgacttcgcaaagacgatcagcaatacgcgtgcgcccgacggagataaagtcgtagtaaggagaaaggcgtttgaaatcggtatagataaggcttggcagagaatcaacaatgtaatcgccattaagcgtgaacggttcaagtcccggttcaaaatagctgatttcattgccgcgctgtaccacttcccggcgcgggccatccatttgcaacaattgtgcaagaggacggttatcgaggcgtgcatgtcgataacgcagagactcaacaccctgtttattgatgctgatgaaactcagctcgtaattcagactctgactggccaggttcatctgctgtaataacgccccggacgcgggagtggcgctggcgttagcagagaataacaggctacctgtcactaaactcatggcaaaccaaagttgcttcattactggctttgcgttcctaaagtttgaattcctggcacctgtacagcggcttgctgggtttgcgcctgctcaaactgaagctgttcagagtggagtcggcgttgcagttcgtaatcctgcaacattgcattaatgcgacgacgctgctcctgtacctgctgctgttgaccattgtttgcggtcgcttcagaaggtactcccaggcttaccgggctggctttacccatcatcggcagtgtattaaataccggcgtttcgggctgctgggacgtttcagattgtccattatagtgctggacgccaacgataactgcaaggcttacgcatgcggctacgcccatttgggtaagctgtgccgcccacggacgtactttctgccagaatggcattttctgccattgatgcggcgcaggctgggcttccgggatcaatgtcgccggttgacgtactggctcttcttcaatggcggccatcacgcgactagagatatcgaaatggagcacctcgggagtatcaccccgcatactgtcacggattaagtgatagctttcccaggttttctgcatttctgggttatgagccagttcgttaagcagctcactatccagcgtttcgccatccattaaagcggaaagttgttctttctgcatgcctaatacccttatccagtatcccgctatcgtcaacgcctgataagcggttgaactttgttatcaatagcttccctcgctcggaagatacgactacgcaccgtacctaccggacaatccatgatagcggctatctcttcatagctcaggccatccagctcccgcaaggttattgccatgcgtaaatcttccgggagggactcaatagttcggaaaactatctgtctcagttcttcactcaacattaagttctcagggttgctaatttctttcaacgcgccgccactttcgaagttttcagcttcaatggcatccacatcactggaaggtggacgacgcccctgagcaaccaggtaatttttcgctgtatttacagcaatccgatacagccatgtataaaaagcgctatctccccggaagctatccagcgcacgataggctttaataaaagcttcttgtaccacatcgggaacatcaccgctcggcacatagcgggaaaccagactcgccactttatgctgatagcgcactaccagtaagttaaaggctttctgatctcccttctggacccgttcaaccaggacctggtccgttaactgctcgctcatccgaggtaaagtctccccaaaccaaatttccacgcgctatcgaaacgccactccattagctgcaatttgagcaagcaaagggttagagtgtctcgtttttgtaaagttccgtaacgcatctgtttttgtttgtcatgctgtagacggatcattatctatcattataagtctacagaatctgaacatcgcattatctgtgtagaaatgcccatttaactgcctgaagagtaacccaacggcctttttatttcaccacctaatcctccaccagccagtaacttctctttttctcgccgccctgcgtcagcgtgtttagcaactgtaacaaatattaaaatagcaggtgtttatccgcacaacatgatgctatgctgaccaaaccatgtttagtaaattaaacaaagaaaatgaatactctccctgaacatagttgtgacgtgttgattatcggtagcggcgcagccggacttagtctggcgctacgcctggctgaccagcatcaggtcatcgttctaagtaaaggcccggtaacggaaggtagtacattttatgcccagggcggtattgccgccgtgtttgatgaaactgacagcattgacagccatgtggaagacacattgattgccggggctggtatttgcgatcgccatgcagttgaatttgtcgccagcaatgcacgatcctgtgtgcaatggctaatcgaccagggggtgttgtttgatacccacattcaaccgaatggcgaagaaagttaccatctgacccgtgaaggtggacatagtcaccgtcgtattcttcatgccgccgacgccaccggtagagaagtagaaaccacgctggtgagcaaggcgctgaaccatccgaatattcgcgtgctggagcgcagcaacgcggttgatctgattgtttctgacaaaattggcctgccgggcacgcgacgggttgttggcgcgtgggtatggaaccgtaataaagaaacggtggaaacctgccacgcaaaagcggtggtgctggcaaccggcggtgcgagcaaggtttatcagtacaccaccaatccggatatttcttctggcgatggcattgctatggcgtggcgcgcaggctgccgggttgccaatctcgaatttaatcagttccaccctaccgcgctatatcacccacaggcacgcaatttcctgttaacagaagcactgcgcggcgaaggcgcttatctcaagcgcccggatggtacgcgttttatgcccgattttgatgagcgcggcgaactggccccgcgcgatattgtcgcccgcgccattgaccatgaaatgaaacgcctcggcgcagattgtatgttccttgatatcagccataagcccgccgattttattcgccagcatttcccgatgatttatgaaaagctgctcgggctggggattgatctcacacaagaaccggtaccgattgtgcctgctgcacattatacctgcggtggtgtaatggttgatgatcatgggcgtacggacgtcgagggcttgtatgccattggcgaggtgagttataccggcttacacggcgctaaccgcatggccagcaatagtttgctggagtgtctggtctatggctggagcgcggcggaagatatcaccagacgtatgccttatgcccacgacatcagtacgttaccgccgtgggatgaaagccgcgttgagaaccctgacgaacgggtagtaattcagcataactggcacgagctacgtctgtttatgtgggattacgttggcattgtgcgcacaacgaagcgcctggaacgcgccctgcggcggataaccatgctccaacaagaaatagacgaatattacgcccatttccgcgtcagtaataatttgctggagctgcgtaatctggtacaggttgccgagttgattgttcgctgtgcaatgatgcgtaaagagagtcgggggttgcatttcacgctggattatccggaactgctcacccattccggtccgagcatcctttcccccggcaatcattacataaacagataaaaagcctgggtcagcgccgtatacgcttcggaatagttctggtctggcccacgaatgactaagcgatcgctaaagcattctcccgcctgcggggagaatgccagcagcacccgatgcggcagtcgcgcttcgttttccgccacatccgtccgcaaacgtaaatgccagcccatgcttaatgccagctccgtaaaaccattaccaatctgctctggcagcactacgcagaaaaatccctcttcggtaatgcactccgccgcacaggtcagcaagcttgggtgatcaagcgtagtggtatagcgagcctgttcccgttgaggtgtgctgcactctactccctgctgatagtaaggtgggttactgatgattaaatcgaagcgtactgtctgctgtgtaatccactgctgaatatccgccgtatggacgttaatccgctctgcccacggggactggttgatattttcctgcgcctgcgcggcagcttcactttccagttcaactgcatcaatcatcacgctgtcatcggttcgctgcgccagcattaatgccagcaacccgctacccgcgccgatatcaaggcaacgttttaccccagccaccggtgcccatgcgcccaataaaataccatccgttcccactttcatcgcacagcgatcgtgagcaacaaaaaactgtttaaaagtaaatccattacgacgaagcacggatgtagactgactcatgaaaataaaaccttgcaggaaaaacggcgatagcaccgggtgagaacaatacccgagaagcgatatccatacaaacagatgaagattgcagccgtaacgtctataatcagcgccccacacagaggtagaacatgactgtaacgactttttccgaacttgaactcgacgaaagcctgctggaagccctccaggataaaggtttcactcgcccgaccgccattcaggctgccgccattccgcctgcgctcgatggccgtgatgtactcggttctgcgccgacaggcaccggtaaaacggcggcgtatctgctgccagcgttgcagcacctgctcgatttcccgcgtaagaaatccggtccgccgcgtattttgatcctcaccccaactcgcgagctggcgatgcaggtgtccgatcatgcccgcgaactggcgaaacatacgcatctggatatcgccaccatcaccggcggcgtagcctatatgaaccacgcggaagtgttcagcgaaaatcaggacatcgtggtcgccacgaccggacgtctgctgcaatacataaaagaagagaacttcgattgccgcgcggttgaaacgctgatcctcgacgaagcagaccgtatgctggatatgggcttcgctcaggatatcgaacatattgctggcgaaacgcgctggcgtaaacagaccctgctctttagcgcaacgctggaaggcgatgcgattcaggactttgccgagcgtctgctggaagatccggtggaagtttctgccaatccctccacccgtgagcgcaaaaaaattcatcagtggtattaccgcgccgatgatcttgagcataaaaccgcgttgctggtgcatctgttaaaacagccggaagcgacccgcagtattgtgtttgtgcgtaagcgtgagcgtgtgcatgagctggcaaactggctgcgcgaagcgggcatcaacaactgctatctcgaaggtgagatggtacagggcaagcgtaacgaagcgatcaagcgtttgaccgaaggtcgcgtaaacgtactggtcgcaaccgatgttgccgcgcgcggtatcgacattcctgacgtcagccacgtctttaacttcgatatgccgcgcagtggcgatacttatttgcaccgtatcggacgtaccgcgcgcgccggtcgtaaaggcaccgcaattagcctggtggaagcccatgaccatctgctgctgggtaaagtaggccgctatattgaagagccaattaaagctcgcgttattgatgagttacgcccgaaaacgcgtgcgccaagcgaaaagcagaccggcaagccaagcaagaaagtactggctaaacgtgctgagaagaaaaaagctaaagagaaagagaagccgcgggtgaaaaaacgccatcgcgacaccaaaaatattggtaagcgccgtaaaccaagcggaacgggcgtgccaccgcaaacgacagaagagtaatctcaatgccaggtttaagcctggtattaaaagtgctggcaaacgcaaaactgcctgatgcgctacgcttatcaggcctacgtggctcatgcaatatattgaatttgcacgatcttgtaggccggataaggcgttcacgccgcatccggcatgaataaagcgcactttgtcgacaagttaaatgccgggtttaatcccgacattatttttatccagccacaaaactctcttcaacacactgaataaaagtgtgcatcgccgggctaaccgcttttccagcatgatgtgcgcacatggccgtaatggtctggctctgttcgccaaaaggcaattcaattaattctccgcactccaactcttttgccaccgcaaagcgcggtaggtagctgaccccgatattcgccgcgacacaacgcttgatgctttcgatacttataagctcaatggtgttttccaccgtgatccgccgctgacgcagcgtgctctcaaatatctgccggaagacacattgcggttcgttgataataaagctacaggcgttatgtcttcccggctcagtaaaatcgacatctgcaatttgcggactagccaccagcaccagactttgttcacccaactctcgtcgattcagagcatcatcattccctacacgataaaagacgccaacatcggcctcatcattcagtagcgcatcacggatcacgtaacagttcaggctctgcaagcttaaacgcacttttggggcgcgttgccgaaaacgctgcaacacctgcggcattcggtaagagagcaacgtttcgccgctaacaacgcgtagttccccgtccggatcactctcctttttggcagcctcacgaagcgtatccatcactcgggtaagttcataaatgtgcggcagcaacttttttccttcgcgggtaaggcacatccgtcggccaattttctcaaataactggacactaaactcctgctcaagctgctgaatatgaaaagtcaccgtgctttgtgtacagcacaatttttggctagctcgcaaaaaggaaccctcttccaccacggttttaagcgtaataaaacggcgcagatccataaccccaaacctatcgaaaatatcgaatctagaatataaaaacattcatttttttaaatgttccgtgtcgggtactgtctaccaaaacagaggagataacaagtgacaccgacccttttaagtgctttttggacttacaccctgattaccgctatgacgccaggaccgaacaatattctcgcccttagctctgctacgagccatggatttcgtcaaagtacccgcgtgctggcagggatgagtctgggatttttgattgtgatgttactgtgtgcgggcattagttttagtctggcagtgattgacccggcagcggtacaccttttgagttgggcgggggcggcatatattgtctggctggcgtggaaaatcgccaccagcccaacaaaggaagacggacttcaggcaaaaccaatcagcttttgggccagctttgctttgcagtttgtgaacgtcaaaatcattttgtacggtgttacggcactgagcacgtttgttctgccgcaaacacaggcgttaagctgggtagttggcgtcagcgttttgctggcgatgattgggacgtttggcaatgtgtgctgggcgctggcggggcatctgtttcagcgattgtttcgccagtatggtcgccagttaaatatcgtgcttgccctgttgctggtctattgcgcggtacgcattttctattaacgaaaaaaagcggaagaggtcgccctcttccgcttagtaacttgctacttaagccttacaggctttcagtaaaggtacgagcgataacgtcgcgctgctgttccggagtcagagagttaaagcgaactgcataaccggatacacggatggtcagctgcggatatttttccggatgcttaactgcatcttccagagtttcgcgacgcagaacgttaacgttcaggtgttgaccaccttcaacgcgaacttctggtttcacttctactggaacttcacggtattcaatgtcacccagtttgcttactgcaaccacttcatcttctgcataacctgcttttgcaacgatgcaacgcgcttcgcctttttcgctgtccagcagccagaaagagttcagcagatcgtcgttagcggctttagtaatctggatacctgtaatcatgtgatgcctccccggcaaaattatttgatttgttcagcctgtcgcggccaattggtaaaaccattgttgcttgagtgtatatatactcctcaaacacccttgaatctttgatttaaatcaataaaaaccacacatcaagtatggtcgcaaatggattttattgttttacatcaacttatgcgggtgtgaaattttaccaatttacatttttttgcactcgtttaagtctaaaaaatgagcatgattttgttctgtagaaagaagcagttaagctaggcggattgaagattcgcaggagagcgagatggctaacgaattaacctggcatgacgtgctggctgaagagaagcagcaaccctattttcttaatacccttcagaccgtcgccagcgagcggcagtccggcgtcactatctacccaccacaaaaagatgtctttaacgcgttccgctttacagagttgggtgacgttaaagtggtgattctcggccaggatccttatcacggaccgggacaggcgcatggtctggcattttccgttcgtcccggcattgccattcctccgagtttattgaatatgtataaagagctggaaaatactattccgggcttcacccgccctaatcatggttatcttgaaagctgggcgcgtcagggcgttctgctactcaatactgtgttgacggtacgcgcaggtcaggcgcattcccacgccagcctcggctgggaaaccttcaccgataaagtgatcagcctgattaaccagcatcgcgaaggcgtggtgtttttgttgtggggaagccatgcgcaaaagaaaggggcgattatagataagcaacgccatcatgtactgaaagcaccgcatccgagcccgcttagcgcgcatcgtggattctttggctgcaaccattttgtgctggcaaatcagtggctggaacaacgtggcgagacgccgattgactggatgccagtattaccggcagagagtgagtaaatttgcggggaaatgccggatggcagagttgccacccggctgatttatcaggctttattctgacgccaccattcaccaagcaaaacgccggttgcgacagagatattcagcccggcaacgttgcccgtaccgtcaatcttcacgcgcagatcgttcggatcgcgtgcggcatccggtaacccttcatattcctgacccagcaccagtaccattttcgctggcagactagttttgaacagcggtttaccctgctcgctggaagtggtcactacggtgtaacctgcctgacggaaatcatccagcacgttaacaatgttgtcgccagtaatcggctgaacgtgctctgcgccgccttctgcggtacggatagccgccccgctctccagcagtgccgcatcctgcaccacgacacctttcacgccgaagtgcgcgcagctgcgcatcatgccacccaggttatgcgggttagattcgttttccagtgccagaacgcaatcctgcgcgcctgcctggcttacccactgctgcacggttgtaccgttacgctttttgatcaagaagcaaacgccgccgtgatgttccgtgccactcgcttttgtcaattccgcttcatccaccacatggtacgctttgcggtttgctgccatccagcgcaaagcttctttaaaacgcggcgttacactctggataaaccaggcgcgaacaatcgcttccggacggctctggaaaagtgcctgacatgcattttcgccgtagacgcgggtttcttccgcacgctgacgacgcaacacttccggatcaataaaacttttaccactgatgccaccgtgatcggccttttccggcgtctcatcacccggcgcgcgggaaaccgtgcgccacgggctatcttcccacttgcggtcacggggctgactctgtttgtcatcgcgggcggggcgacggccaccgtcagcacgagattttcctggacgcccgccccctttcccggtacgcgggttgtgggtacgtttatcagaatcatcatcactgcggacatacatcactttgaccttgccgcttttacctttcatttcatcgttcatgcttttctccaccagcgctgcgcgaagcgcgcagattacccgaagtccgcgcggttcgccatgatttcgtaccaaagcctgcgactatcatacctattgaataaaacagattgttgtctggaacaatgtccccgataatatgtaacatattagaaacataccggcgtcgttgccgataagtctccttactcatcccgaggttagttatgaataccgtttgtacccattgtcaggccatcaatcgcattcccgacgatcggatcgaagatgcggcaaaatgcggacgctgcggtcacgacttgtttgacggagaggtgattaatgcgaccggtgaaacactcgacaaattgctgaaggatgatctacctgtggtgatcgacttctgggcaccgtggtgcggcccctgccgtaatttcgcaccaatttttgaagatgtcgcgcaagagcgtagcggtaaagtgcgctttgtgaaagtgaataccgaagctgaacgtgaattgagcagtcgctttggaattcgtagtataccgacgatcatgattttcaaaaacggtcaggttgtcgacatgcttaatggcgcagtaccgaaagcgccgttcgatagctggctgaacgaatctctttaatcttaccggggcgcatcttgtgccccgttttctcctctgcgacaatggcgttttttcgacgctctcttatgaccgaaaacgctgttctccagttacgcgccgagcgtattgcgcgcgcaacacgtccttttcttgcccgcggtaatcgcgttcgtcgctgccaacgctgtcttttgccagagaaattatgtctctgtagcacaattaccccagcacaagcaaaaagtcgcttctgtttgctgatgttcgacaccgagccaatgaagcccagtaataccgggcgtctcattgctgatattttgcctgataccgttgcgtttcaatggagccgtaccgaacccagccaggatttgctggagttggtgcaaaacccggactatcagccaatggtggtctttcccgctagctatgctgatgagcaacgggaagtgatcttcacaccacctgccggtaagccaccgctgtttatcatgctcgatggtacctggccggaagctcgcaagatgtttcgtaaaagtccgtatctggataatcttcccgtcatttccgtcgatctttcccggctttctgcctatcgcctgcgtgaagcccaggctgaaggccaatattgtactgccgaggtagccatcgcactgttagatatggccggcgataccggggcggcggcagggttaggcgagcattttacccgctttaaaacacgctatctggcaggaaaaacgcaacatctgggtagcatcacagcagaacagttagaaagcgtttaaaatcattcggtcacttctgcgggagaccggtatgagtcagcgaggactggaagcactactgcgaccaaaaagcatagcggtaattggcgcgagcatgaaacccaatcgcgcaggttacctgatgatgcgtaacctgctggcgggaggctttaacggaccggtactcccggtgacgccagcctggaaagcggtgttgggtgtgttggcctggccggatattgccagcttgccctttacacccgaccttgcggttttatgtaccaatgccagccgtaatcttgctcttctggaagagctcggcgagaaaggctgtaaaacctgcattattctttccgccccggcaagccaacacgaagatctccgcgcctgcgccctgcgccataacatgcgcctgcttggaccaaacagtctgggtttactggctccctggcaaggtctgaatgccagctttagccctgtgccgattaaacgcggcaagctggcgtttattagccaaagcgctgccgtctccaacaccatcctcgactgggcgcaacagcgtaagatgggcttttcctactttattgcgctcggcgacagcctggatatcgacgttgatgaattgcttgactatctggcacgcgacagtaaaaccagcgccatcctgctctatctcgaacagttaagcgacgcgcgacgctttgttagcgcggcccgtagtgccagccgtaataaaccgattctggtgattaaaagcggacgtagcccggcggcacagcgactgctcaacacgacggcaggaatggacccggcatgggatgcggctattcagcgtgccggtttgttgcgggtacaggacacccacgagctgtttagcgcggtggaaacccttagccatatgcgcccgctacgtggcgaccggctgatgattatcagcaacggtgctgcgcctgccgcgctggcgctggatgccttatggagtcgcaatggcaagctggcaacgctaagcgaagaaacctgccagaaactgcgcgatgcactgccagaacatgtggcaatatctaacccgctcgatctacgcgatgacgccagcagtgagcactatattaaaacgctggatattctgctccacagccaggattttgacgcgctgatggttattcatagccccagcgccgctgctcccgcaacagaaagcgcgcaagtattaattgaagcggtaaagcatcatccccgcagcaaatatgtctctttgctgacgaactggtgcggcgagcactccagccaagaggcacgacgtttattcagcgaagccgggctgccgacctaccgtaccccggaaggaaccatcactgcttttatgcatatggtggagtaccggcgtaatcagaagcaactacgcgaaacgccggcgttgcccagcaatctgacttccaataccgcagaagcgcatcttctgttgcaacaggcgattgccgaaggggctacgagcctcgatacccatgaagttcagcccatcctgcaagcgtatggcatgaacacgctccctacctggattgccagcgatagcaccgaagcggtgcatattgccgaacagattggttatccggtggcgctgaaattgcgtagcccggatattccacataaaagcgaagttcagggcgtcatgctttacctgcgtacagccaatgaagtccagcaagcggcgaacgctattttcgatcgcgtaaaaatggcctggccacaggcgcgggtccacggcctgttggtgcaaagtatggctaaccgtgctggcgctcaggagttgcgggttgtggttgagcacgatccggttttcgggccgttgatcatgctgggtgaaggcggtgtggagtggcgtcctgaagatcaagccgtcgtcgcactgccgccgctgaacatgaacctggcccgctatctggttattcaggggatcaaaagtaaaaagattcgtgcgcgcagtgcgctacgcccattggatgttgcaggcttgagccagcttctggtgcaggtttccaacttgattgtcgattgcccggaaattcagcgtctggatattcatcctttgctggcttctggcagtgaatttaccgcgctggatgtcacgctggatatcagcccgtttgaaggcgataacgagagtcggctggcagtgcgcccttatccgcatcagctggaagaatgggtagaattgaaaaacggtgaacgctgcttgttccgcccgattttgccagaagatgagccacaacttcagcaattcattagccgagtcaccaaagaagatctttattaccgctactttagcgagatcaacgaatttacccatgaagatttagccaacatgacacagatcgactacgatcgggaaatggcgtttgtagcggtacgacgtattgatcaaacggaagagatcctcggcgtcacgcgtgcgatttccgatcctgataacatcgatgccgaatttgctgtactggttcgcagcgatctcaaagggttaggcttaggtcgacgcttaatggaaaagttgattacctatacgcgagatcacggactacaacgtctgaatggtattacgatgccaaacaatcgtggcatggtggcgctagcccgcaagctcgggtttaacgttgatatccagctcgaagaggggatcgttgggcttacgctaaatcttgcccagcgcgaggaaagttgagtaaggtactggaaatgttgaccacttaatcgggactggtgttattattgcccgcttatgtcgtctgcattgcacagaggacccttcaatgaacagagaagaaatgcactgtgatgttgagtaaatttaagcgtaataaacatcaacaacaccttgcccaactacccaagatttctcaaagtgttgatgatgtcgatttcttttacgctcccgccgacttccgggagacgctgctggaaaaaatagccagcgcgaagcagcgcatttgcattgtcgccctgtatctcgaacaggatgacggtggcaaaggcattctgaacgcgttgtatgaggctaaaaggcagcgtccggaactggatgtgcgggtgctggtcgactggcatcgtgcacaacgtggacgcattggcgctgcggcatctaacactaacgctgactggtactgccgcatggcgcaggaaaatccgggcgtagatgttccggtttatggcgttccaatcaatactcgtgaagcccttggtgttctgcactttaaaggctttatcatcgacgatagcgtactttatagcggtgccagcctgaacgatgtttacctgcatcagcacgataaatatcgctacgaccgttatcatctgatccgtaaccgtaagatgagtgacattatgtttgaatgggttacacagaatattatgaatggccgcggcgttaatcgtctggatgatgttaatcggccaaaaagcccggaaatcaagaacgatattcgtctgttccgccaggagctgcgtgatgccgcttatcatttccagggcgatgccgacaacgatcagctttctgtaacgccgctagtggggctggggaaaagcagtctgttgaacaagaccattttccatcttatgccttgtgccgagcagaaactaaccatctgtacgccatacttcaacctgccagcaatccttgtgcgcaatattatccagttgctgcgcgaagggaaaaaggtcgaaattattgttggtgataaaaccgcgaatgacttctacattccggaagatgaacctttcaagataattggcgcattgccttatctctatgagatcaatctgcgtcgtttcctgagccgtttgcagtattacgtcaatactgaccagctagtggttcggttatggaaagatgacgacaacacctatcacctgaaagggatgtgggttgatgataagtggatgttgatcaccggtaataacctgaacccgcgcgcctggcgtctggatctggaaaacgccattttgatccacgatccgcaacttgagctggcgccacagcgagagaaagaactggagctgatccgcgagcataccaccatcgttaagcactatcgcgatctgcaaagtattgccgattatccggtgaaggttcgtaaactcatccgccgtttgcgccgtatccgcatcgaccgattaattagccgcatcctgtaatcacaaccccgtcctgtacggggtttgttttttggaggccacgttttgcgtattctttttgtctgttcgctattgttactttctggatgcagccatatggctaacgatagctggagcgggcaggataaagctcaacactttatcgccagcgcgatgctttccgccgccggaaatgaatatagtcagcatcaggggatgagccgggatcgcagtgccatgtttggattgatgttctctgtcagtttgggggcgagtaaagagctttgggatagccgccccgaagggagcggctggagctggaaggatttggcctgggatgtcgccggtgcaagcaccggctataccgtctggcaactgacccgtcattaaagacgcatccccttccctttgcgatgtagcatcaaagaaaccagaaacgccaccacggccatcaaggtcacataccagaagaaggctgtttccattcctatacttttcaggctcaacgctacgtactccgcgctaccaccaaatatagcattagcgaccgcataactcagaccaacgcctaatgcgcgaacctgtgccgggaacatctcagccttcagtattccactgatacttgtataaaaactcactatcagcagggcacacatcaccagaccaaaagcggcataagggctggaaacgttttgcaatgcactgagaataggaacggtaaaaatggctgccaggctaccgaaacataacatactggtacggcgaccaatcttatcgctcagcgcgccaatgagtggttgaataagcatgaatacaaacaatgcggcagtcataatgccactcgccacgttggcatgcattcccgcagtatttaccagatacttctgcatataagtagtgaaggtatagaaacaaagggagcccgcagcggtaaaaccgagaaccatgatgaatgcacggcgattgcgccataatcctttcagagatccagcttcttttaaagcgcgcgtttcttgttggctagtttcatctaactgacgacgtaaccacaacgccacaacagctaacacagctcctaacgcgaaaggaatacgccatccccactctctgagtgcagcgtcttccatggtgtgttgtaaaaccacgacaaccagtagggctagcagttgtccgccgatcaacgtcacatactgaaaacttgcgtaaaaacctttgcgcccttcaacggcaacttcactcatataggtggcgctggtgccatattctccgccaacagataatccctgaaataaacgagcgagaagcaataatgccggagcccacgtacctatagtttcataacctgggaggcaggcgataaccaggcttccgaaacacatcatacacacgcttaacagcatgctttttttgcgaccatgtttatcggctatgcggccaaatagccaaccgcctattgggcgcatcaggaatcccgcagcaaaaacacctgctgtttgtagtagttgagtcgtcgtgttcccggaagggaagaagatgtgggcaaagtagagactacagaagctgtagacatagaaatcgaaccactcgaccagattaccactagaggcccccacaatcgcccaaatgcggcgacgagtatcactacttgtcagtttgctgtctgccgttacagtactttcagccatgccattatgtctcctgccgtaatccgatgcttttgtcggtcgcttttgtttattttttttgtaaaggaaatattatacatttgttgcatatcattatgcaaccttaaccatgaatttagttagcaggaaaatggttattgaggagcttaaggataaatttctggtaaggaggacacgtatggaagtgggcaagttggggaagccgtatccgttgctgaatctggcatatgtgggagtataagacgcgcagcgtcgcatcaggcatttttttctgcgccaatgcaaaaaggccatccgtcaggatggcctttcgcataatttgatgcctggcagttccctactctcgcatggggagaccccacactaccatcggcgctacggcgtttcacttctgagttcggcatggggtcaggtgggaccaccgcgctacggccgccaggcaaattctgttttatcagaccgcttctgcgttctgatttaatctgtatcaggctgaaaatcttctctcatccgccaaaacagcttcggcgttgtaaggttaagcctcacggttcattagtaccggttagctcaacgcatcgctgcgcttacacacccggcctatcaacgtcgtcgtcttcaacgttccttcaggacccttaaagggtcagggagaactcatctcggggcaagtttcgtgcttagatgctttcagcacttatctcttccgcatttagctaccgggcagtgccattggcatgacaacccgaacaccagtgatgcgtccactccggtcctctcgtactaggagcagcccccctcagttctccagcgcccacggcagatagggaccgaactgtctcacgacgttctaaacccagctcgcgtaccactttaaatggcgaacagccatacccttgggacctacttcagccccaggatgtgatgagccgacatcgaggtgccaaacaccgccgtcgatatgaactcttgggcggtatcagcctgttatccccggagtaccttttatccgttgagcgatggcccttccattcagaaccaccggatcactatgacctgctttcgcacctgctcgcgccgtcacgctcgcagtcaagctggcttatgccattgcactaacctcctgatgtccgaccaggattagccaaccttcgtgctcctccgttactctttaggaggagaccgccccagtcaaactacccaccagacactgtccgcaacccggattacgggtcaacgttagaacatcaaacattaaagggtggtatttcaaggtcggctccatgcagactggcgtccacacttcaaagcctcccacctatcctacacatcaaggctcaatgttcagtgtcaagctatagtaaaggttcacggggtctttccgtcttgccgcgggtacactgcatcttcacagcgagttcaatttcactgagtctcgggtggagacagcctggccatcattacgccattcgtgcaggtcggaacttacccgacaaggaatttcgctaccttaggaccgttatagttacggccgccgtttaccggggcttcgatcaagagcttcgcttgcgctaaccccatcaattaaccttccggcaccgggcaggcgtcacaccgtatacgtccactttcgtgtttgcacagtgctgtgtttttaataaacagttgcagccagctggtatcttcgactgatttcagctccatccgcgagggacctcacctacatatcagcgtgccttctcccgaagttacggcaccattttgcctagttccttcacccgagttctctcaagcgccttggtattctctacctgaccacctgtgtcggtttggggtacgatttgatgttacctgatgcttagaggcttttcctggaagcagggcatttgttgcttcagcaccgtagtgcctcgtcatcacgcctcagccttgattttccggatttgcctggaaaaccagcctacacgcttaaaccgggacaaccgtcgcccggccaacatagccttctccgtccccccttcgcagtaacaccaagtacaggaatattaacctgtttcccatcgactacgcctttcggcctcgccttaggggtcgactcaccctgccccgattaacgttggacaggaacccttggtcttccggcgagcgggcttttcacccgctttatcgttacttatgtcagcattcgcacttctgatacctccagcatgcctcacagcacaccttcgcaggcttacagaacgctcccctacccaacaacgcataagcgtcgctgccgcagcttcggtgcatggtttagccccgttacatcttccgcgcaggccgactcgaccagtgagctattacgctttctttaaatgatggctgcttctaagccaacatcctggctgtctgggccttcccacatcgtttcccacttaaccatgactttgggaccttagctggcggtctgggttgtttccctcttcacgacggacgttagcacccgccgtgtgtctcccgtgataacattctccggtattcgcagtttgcatcgggttggtaagtcgggatgacccccttgccgaaacagtgctctacccccggagatgaattcacgaggcgctacctaaatagctttcggggagaaccagctatctcccggtttgattggcctttcacccccagccacaagtcatccgctaatttttcaacattagtcggttcggtcctccagttagtgttacccaaccttcaacctgcccatggctagatcaccgggtttcgggtctataccctgcaacttaacgcccagttaagactcggtttcccttcggctcccctattcggttaaccttgctacagaatataagtcgctgacccattatacaaaaggtacgcagtcacacgcctaagcgtgctcccactgcttgtacgtacacggtttcaggttctttttcactcccctcgccggggttcttttcgcctttccctcacggtactggttcactatcggtcagtcaggagtatttagccttggaggatggtccccccatattcagacaggataccacgtgtcccgccctactcatcgagctcacagcatgtgcatttttgtgtacggggctgtcaccctgtatcgcgcgcctttccagacgcttccactaacacacacactgattcaggctctgggctgctccccgttcgctcgccgctactgggggaatctcggttgatttcttttcctcggggtacttagatgtttcagttcccccggttcgcctcattaacctatggattcagttaatgatagtgtgtcgaaacacactgggtttccccattcggaaatcgccggttataacggttcatatcaccttaccgacgcttatcgcagattagcacgtccttcatcgcctctgactgccagggcatccaccgtgtacgcttagtcgcttaacctcacaacccgaagatgtttcacttcagagttgcgaaaatttgagagactcacgaacaactttcattgttcagtgtttcaattttcagcttgatccagatttttaaagagcaaatatatcaaacaagacttaacagtctgttttgagatattgaggtcggcgactttcactcacaaaccagcaagtggcgtcccctaggggattcgaacccctgttaccgccgtgaaagggcggtgtcctgggcctctagacgaaggggacacgaaaattgcttatcacgcgttgcgtgatattttcgtgtagggtgagctttcattaatagaaagcgaacggccttattctcttcagcctcactcccaacgcgtaaacgccttgctattcacttttcatcagacaatctgtgtgagcactgcaaagtacgcttctttaaggtaaggaggtgatccaaccgcaggttcccctacggttaccttgttacgacttcaccccagtcatgaatcacaaagtggtaagcgccctcccgaaggttaagctacctacttcttttgcaacccactcccatggtgtgacgggcggtgtgtacaaggcccgggaacgtattcaccgtggcattctgatccacgattactagcgattccgacttcatggagtcgagttgcagactccaatccggactacgacgcactttatgaggtccgcttgctctcgcgaggtcgcttctctttgtatgcgccattgtagcacgtgtgtagccctggtcgtaagggccatgatgacttgacgtcatccccaccttcctccagtttatcactggcagtctcctttgagttcccggccggaccgctggcaacaaaggataagggttgcgctcgttgcgggacttaacccaacatttcacaacacgagctgacgacagccatgcagcacctgtctcacggttcccgaaggcacattctcatctctgaaaacttccgtggatgtcaagaccaggtaaggttcttcgcgttgcatcgaattaaaccacatgctccaccgcttgtgcgggcccccgtcaattcatttgagttttaaccttgcggccgtactccccaggcggtcgacttaacgcgttagctccggaagccacgcctcaagggcacaacctccaagtcgacatcgtttacggcgtggactaccagggtatctaatcctgtttgctccccacgctttcgcacctgagcgtcagtcttcgtccagggggccgccttcgccaccggtattcctccagatctctacgcatttcaccgctacacctggaattctacccccctctacgagactcaagcttgccagtatcagatgcagttcccaggttgagcccggggatttcacatctgacttaacaaaccgcctgcgtgcgctttacgcccagtaattccgattaacgcttgcaccctccgtattaccgcggctgctggcacggagttagccggtgcttcttctgcgggtaacgtcaatgagcaaaggtattaactttactcccttcctccccgctgaaagtactttacaacccgaaggccttcttcatacacgcggcatggctgcatcaggcttgcgcccattgtgcaatattccccactgctgcctcccgtaggagtctggaccgtgtctcagttccagtgtggctggtcatcctctcagaccagctagggatcgtcgccttggtgagccgttaccccaccaacaagctaatcccatctgggcacatccgatggcaagaggcccgaaggtccccctctttggtcttgcgacattatgcggtattagctaccgtttccagtagttatccccctccatcaggcagcttcccagacattactcacccgtccgccactcgtcagcgaagcagcaagctgcttcctgttaccgttcgacttgcatgtgttaggcctgccgccagcgttcaatctgagccatgatcaaactcttcaatttaaaagtttgatgctcaaagaattaaacttcgtaatgaattacgtgttcactcttgagacttggtattcatttttcgtcttgcgacgttaagaatccgtatcttcgagtgcccacacagattgtctgataaattgttaaagagcagtgccgcttcgctttttctcagcggcgcggggtgtgcataatacgccttcccgctacagagtcaagcatttctttgcttttctctgttgagattctcaggagaaccccgccgacccggcggcgtgtttgccgttgttccgtgtcagtggtggcgcattatagggagttattccggcctgacaagcgaaaaatataaaaactttatcgttcgctcacttttcaggcaaaacatcttaaatatagtcttttccgtctaacttatagacaaaaacgagccccgaagggctcgttttatcatttactggacggcgacaatccggtcttcattaacttccaggcgaatcactttacccggaaccaattcaccagacagtatttgctgtgccagcgggttttcgatctgctgctgaattgcacgtttcagaggacgtgcaccatagaccggatcgtaaccgttctcgctcagcagtttcagcgcctcgtcagaaatgtggatttcataaccacgttcttccagacgtttgtacagacgtttcaactgaatctgcgcaatgctggcaatgtgctgttcacccagcggatggaagaccaccacttcatcgatacggttaatgaattccggacggaagttatggcttaccacaccgagcaccagctctttcatgtgcgcataatccagttcaccgaagcgttcctgaatcagatcggaaccgaggttagaggtcataatgacgaccgtattacggaagtcgaccgttctcccttgcccgtcagtcagacgcccatcatccagtacctgcaacagaatgttgaagacatccggatgcgctttttccacttcatccagcaggatgacggaatacggacgacgacgcaccgcttcggtcaggtagccaccttcttcataaccgacatatcccggaggcgcaccaaccaaacgagacacgctgtgtttctccataaactcggacatatcgatacggaccatcgcctcgtcgctatcaaacataaagttcgccagcgccttacaaagctctgttttccccacaccagttgggccgaggaacaggaaactaccaatcgggcgatttggatccgccagccccgcacggctacgacgaatagcgttagataccgcatcaaccgcttcgttctgaccaattacgcgatggtgcagttcttgctccatacgcagcagtttttcgcgctcgctttccatcatgcgagaaaccggaatccccgtccaacgcgccagcacttcagcaatttcggcgtcggtcactttattacgcaacagacgcatagttttgccttcgagctgcgttgcggcttccagttgcttttccagttccgggattttgccgtattgcagttcagacatccgcgccaggtcccccacacggcgagcctgttcaatagcgattttcgcctgttccagttccgctttaatggtctgcgtaccagaaaggcttgccttctctgctttccactcttcttctaactcggagtactgacgttctttgtcgctcagttcttcgttgagcatatccagacgttttttactggcttcatcagactctttcattaacgcctgttgttccagtttgagctggatgatacgacgatcgagtcggtcgagttcttctggtttactgtcaatctgcatacgaatgctggatgctgcttcatcgatcaggtcgatggctttatccggcagctgacggtcagcaatgtagcgatgagacaacgtcgccgctgcaacaattgccgggtcagtaatttgcacatggtggtgcaattcgtaacgttctttcaggccacgcagaatcgcaatggtatcttcaacagaaggctcggcaacaaacactttctggaaacgacgttccagcgcagcatctttttcaatgtactggcgatattcgtcaagcgtcgtggcacctacgcagtgcaattcaccacgcgccagcgccggtttcagcatgtttccggcgtccattgcgccatcggctttacccgcgccgaccatggtatgtaattcgtcgataaataggatgacgttgccttcctgtttggcaagatcgttaagcacgccttttaaacgttcttcaaactcaccgcgatatttcgccccagccaccagcgcgcccatatccagcgccagtacccggcggcctttcaacccttccggcacttcgccgttgataatacgctgcgccagaccttcaacgatggcagttttaccgacgccgggttcaccaatcagtaccgggttatttttagtacgacgttgcagcacctgaatggtacggcgaatttcttcatcacgaccaatcaccggatcgagtttgccctgttcggctcgttcggtaaggtcgatggtatattttttcaaagcctgacgttggtcttcagcaccttgatcgttcacgctttcacctccacgcatttgttcaatcgcttgagtaatgttggcggtggtcgcccctgctgctttcaggatgtcggccagcgtgccgcgagactcaagtgccgccagaacgaacagttcactgctgataaagttatcaccacgtttttgcgccagcttgtcgcaaagattaagaacgcgcaccagatcctgacttggctggacatcaccaccagtaccttcaacctgcggtaaacgatttaatgcctgattgatatctgtgcgcaactggccagcatttatgccagcggatgttaataaaggactaacgctacccccttcctgattcagcagggcgctcattaaatgaagtggttcgataaattggttgtcgtgcccgagtgcaagactttgggcatcggcaagagcaagctggaatttattagtaagacgatccagacgcataactcctcccataacggatcaaagttgctactggagattaaatgaggtcatccctcaattattcaaggttattgaccagattaatgtgaaaagaaaatcacgcgtaccggatcgtcttgattctttaggttatatcagccaaatgaaacttgccatacgaccggtggtcttgtcgcgacgataagagaagaaagtctcattttccgtatatgtacaacggtcgccgccgaaaatttgctcaacacccacgttcgccagacgctgccgggcaagctgataaatatccgccagatacttatcaccatgctgaatgaaagctgcacttgctttagcgtctactgccataaacgcctcgcgaacctccccccccacttcgaacgcgcgtggaccaattgccggccctaaccaggcgagaatattttccggattatcagcaaaacaggaaaccgtctcttccagcacgcctgcgcacagtccacgccagccagcatgagcggcggcgacttccgttcccgctcgattgcaaaacagcacagggaggcagtcggcagtcatcactgcgcaaaccgtgccgggcgtattgctataagaggcatccgcccgtttactggcataaggttcgccagtgagcttaagcacatctttgccgtgtacctgctcaagccagaccggtttagaaggcaaattgcccgcagcaaaaagtcgcttgcgattctcctcaacgtgatccgggttatcgccacaatgggcaccgaggttgagactgtcatacgggggcaagctcacgccgccgatacgagtggagctacaggccgcaacaccttttggctgcggccactgcgggacaatcagcttactcataaccagtccacttcatccttatgttcttcgaaatcggcgcgcatcacctcaatcagctccaccatatcttgtggaataggcgcatgccattccatttcgatgccggagatcgggtgataaagacgcagcatggttgcatgtagcgcctggcggtcaaacttacgcagcgtggagataaatgcttcgctagcaccttttggcggacgcggacggccaccataaaccggatcgcccaccagcggatgagtgatatgggccatatgcacgcggatctggtgcgtacgtccagtttccagacgcaaccgcagacgcgtgtgcacacggaagtgttccatgatgcgatagtgagtcaccgctggtttgcccatcggatgcaccgccatatgggtacgtttggtcgggtggcgactgattggctcgtccaccgtgccacctgcggtcatatgaccaatcgccaccgcttcatactcacgagtaatttcacgccgttgcaaagattcgactaaacgcgtctgagccggaacggtttttgccacaaccatcaggccagtggtgtctttatccagacgatggacgatgcccgcacgcggtacatcggcaatgggtggatagtaatgaagcaacgcattcagtaccgtgccatccgggttacccgcgccaggatgtaccaccaggtcgcgcggtttattaatgataataatgtcttcatcttcatagacgatatccagcgggatatcctgcggttcaaaacgcgcttcttcttcaatctcagcgttgatggcaacctgctcgccacccaatactttttctttcggcttatcacaaactttgccgttaaccagcactcgctggtcgaggatccattcttttattcggctacgactataatccgggaacatttcggccaaagcctgatctaagcgttgaccgagttggttttcggacaccgttgcagtgagctgtactcgttgtgccatatatactgcttcttcgtttatcgttggggttttacggctttgccgtttaatatagtgtgctattgtagctggtcttaaccgggagcaggaacagagaatctcccgtattacattttgaggaaagtcaaaacgtcatgacgcgcatgaaatatctggtggcagccgccacactaagcctgtttttggcgggttgcagcgggagtaaggaagaagtacctgataatccgccaaatgaaatttacgcgactgcacaacaaaagctgcaggacggtaactggagacaggcaataacgcaactggaagcgttagataatcgctatccgtttggtccgtatagccagcaggtgcagctggatctcatctacgcctactataaaaacgccgatttgccgttagcacaggctgccatcgatcgttttattcgccttaacccgacccatccgaatatcgattatgtcatgtacatgcgtggcctgaccaatatggcgctggatgacagtgcgctgcaagggttctttggcgtcgatcgtagcgatcgcgatcctcaacatgcacgagctgcgtttagtgacttttccaaactggtgcgcggctatccgaacagtcagtacaccaccgatgccaccaaacgtctggtattcctgaaagatcgtctggcgaaatatgaatactccgtggccgagtactatacagaacgtggcgcatgggttgccgtcgttaaccgcgtagaaggcatgttgcgcgactacccggatacccaggctacgcgtgatgcgctgccgctgatggaaaatgcataccgtcagatgcagatgaatgcgcaagctgaaaaagtagcgaaaatcatcgccgcaaacagcagcaatacataacagaaacctgaaacacaaaacggcagcccttgagctgccgtttttttattctgtcagttgtgaaactgaagcgatttagtcgctatcgatctcatcaaatatggctcgctttgagatattcctcaagtaaaaaaacatctcttcctgcgatttctcacaaaaaagattcgttgacaaaaagtgacaaaattatgagattttcatcacacattttgacatcaggaacggtatgctgaattcaccaagacgggaagacaagaggtaaaatttatgacaatgaacattaccagcaaacaaatggaaattactccggccatccgccaacatgtcgcagaccgtctcgccaaactggaaaaatggcaaacacatctgattaatccacatatcattctgtccaaagagccacaagggtttgttgctgacgccacaatcaatacacctaacggcgttctggttgccagtggtaaacatgaagatatgtacaccgcaattaacgaattgatcaacaagctggaacggcagctcaataaactgcagcacaaaggcgaagcacgtcgtgccgcaacaagcgtgaaagacgccaacttcgtcgaagaagttgaagaagagtaatcctttatattgagtgtatcgccaacgcgccttcgggcgcgttttttgttgacagcgtgaaaacagtacgggtactgtactaaagtcacttaaggaaacaaacatgaaacacataccgtttttcttcgcattcttttttaccttcccctgaatgggaggcgtttcgtcgtgtgaaacagaatgcgaagacgaacaataaggcctcccaaatcggggggccttttttattgataacaaaaaggcaacactatgacaagcgaaaacccgttactggcgctgcgagagaaaatcagcgcgctggatgaaaaattattagcgttactggcagaacggcgcgaactggccgtcgaggtgggaaaagccaaactgctcagccatcgcccggtacgtgatattgatcgtgaacgcgatttgctggaaagattaattacgctcggtaaagcgcaccatctggacgcccattacattactcgcctgttccagctcatcattgaagattccgtattaactcagcaggctttgctccaacaacatctcaataaaattaatccgcacagtgcacgcatcgcttttctcggccccaaaggttcttattcccatcttgcggcgcgccagtatgctgcccgtcactttgagcaattcattgaaagtggctgcgccaaatttgccgatatttttaatcaggtggaaaccggccaggccgactatgccgtcgtaccgattgaaaataccagctccggtgccataaacgacgtttacgatctgctgcaacataccagcttgagcattgttggcgagatgacgttaactatcgaccattgtttgttggtctccggcactactgatttatccaccatcaatacggtctacagccatccgcagccattccagcaatgcagcaaattccttaatcgttatccgcactggaagattgaatataccgaaagtacgtctgcggcaatggaaaaggttgcacaggcaaaaagtccgcatgttgctgcgttgggaagcgaagctggcggcactttgtacggtttgcaggtactggagcgtattgaagcaaatcagcgacaaaacttcacccgatttgtggtgttggcgcgtaaagccattaacgtgtctgatcaggttccggcgaaaaccacgttgttaatggcgaccgggcaacaagccggtgcgctggttgaagcgttgctggtactgcgcaaccacaatctgattatgacccgtctggaaagtcgcccgattcacggtaatccatgggaagagatgttctatctggatattcaggccaatcttgaaagtgcggaaatgcaaaaagcattgaaagagttaggggaaatcacccgtagtatgaaggtattgggctgttacccaagtgagaacgtagtgcctgttgatccaacctgatgaaaaggtgccggatgatgtgaatcatccggcactggattattactggcgattgtcattcgcctgacgcaataacacgcggctttcactctgaaaacgctgtgcgtaatcgccgaaccagtgctccaccttgcggaaactgtcaataaacgcctgcttatcgccctgctccagcaactcaatcgcctcgccgaaacgcttatagtaacgtttgattaacgccagattacgctcactgctcataatgatgtcggcataaagctgcggatcctgagcaaacagtcgcccgaccatcgccagctcaaggcggtaaatcgggctagagagcgccagaagttgctcaagctgaacattttcttctgccaggtgcagcccgtaagcaaaagtagcaaagtggcgcagtgcctgaataaacgccatattctgatcgtgctcgacggcgctaatacgatgcagccgagcgccccagacctgaatttgctccagaaaccattggtatgcttccggtttacgtccatcacaccagaccacaacttgctttgccaggctaccgctgtccggaccgaacatcgggtgtagccccagcaccggaccatcatgcgccaccagcatggcctgtaatggcccatttttcacacttgccagatcgaccagaatacaatctttcggtaaaggcggtaatttgccaataacttgctcagtaacgtggattggcacactaacaatcaccattccggcatcggcaacaatatcagccgctcgatcccagtcatgttgctccagaatccgcacctgataaccgctgagggtcagcatcttctcgaacaggcgtcccatctgaccgccaccgccgacgataaccaccggacgcagactcggacaaagtgttttaaatcctttgtcgttttcactggagtaagattcacgcatcacccgacgcaaaacatcctcaatcagatctggcggtacacccagagcttccgcctctgcacgacggctggccaacatagatgcctcgcgctccggaacataaataggcagtccaaagcggcttttcacctcgcccacttcagcaaccagttccagacgcttcgctaataaattcagcagcgctttatcgacttcatcaatttgatcgcgtaatgcggtcaattcagcaaccataataaacctcttaagccacgcgagccgtcagctgcccgttcagatcctgatgaatttcacgcagcaaggcatcggtcatttcccagctaatgcaggcatcggttacggatacaccgtatttcatttcactgcgcggttgctcggaagactgattgccctcgtggatattactttcgatcatcagaccaataatactgcgattgccatctttgatttgagcaaccacggattctgccaccgcaggctgacggcgataatctttattggaattaccgtggctgcaatctaccatcagagacgggcgcagtcccgcctgttccatctctttttcacattgcgcaacatccgcagggctatagttcggcgctttaccaccgcgcaggatcacatggccgtccggattcccctgagtttgtagcaacgcaacctgccctgcctggttaatgccaacaaaacggtgcggctgggcggcggcgcgcatagcgttaattgctgttgccagactgccgtcggtgccgtttttaaaaccaaccggcatggaaagcccggaggccatttcacggtgagtttggctttccgttgtacgagcaccaattgcactccagctaaacagatcgcccaggtattgcgggctattcggatctaacgcttccgtcgccagtggcagtcccatattcaccagctcaagcagcaatttacgcgcgatctgcagcccggcttctacatcaaaagagccatccatatggggatcgttaattaaccctttccagccgacagtggtacggggtttttcaaaatagacgcgcattaccagatagaggctatcgctgacctctgcggcaagggctttaaatcgacgagcatattccagagcagtttccggatcatgaatggaacaaggaccacatactaccagcagacgaggatcgcgcccggcgataatatcactaatgcttttacggctgtcagcaatctgggcttcttgttgcaggctcaatggaaaagcggccttcagttgttccggagtcattaaaacctgttcgtcggtaatatgtacgttattcagcgcgtctttttgcatgatggcgatcctgtttatgctcgtttgcgatagttgatcctcagcgaggatgacgtaacgataacacataaagtaaagttttcaatccatatttcgtacatttttatttacacaggcaatttagtcgcgctttcaacccttacctctgtatagataaatttacactccctttgaaaacaatccgctatgctttgaaaaaggagaaagaaatgatgaaaaagtttatcgcccccttgttggctttactggttagcggatgtcagattgatccttatactcacgcgccaaccttgaccagcaccgactggtatgatgtcggtatggaagatgcgataagcggcagcgccataaaagatgacgatgcatttagcgatagtcaggcggatcgcggtctataccttaaaggatatgccgaaggacaaaagaaaacttgccagaccgattttacttatgcccgaggactttccggtaaaagctttcctgccagctgcaacaatgttgaaaatgccagccaactgcatgaagtaggcaaaaaggggctgatgaaaatgccagcacaatacgattaaattaattaaaaccccacaaataaattaaacataagattttactcattgtgttttatttctcacattgatgacggtcgcatgaaaaaatgatattttaatgagcattctgaaaaaatatcgatgcatttcgagcgaagatggtggggatccctgaatgcgtttttctcaccgactgttcttacttctgattctcctgctgacgggagcaccaatactcgctcaggagccttctgacgttgcgaaaaacgtgcgtatgatggtttccggtattgtcagttacacccgctggcctgcgctaagtgggccaccaaagttatgtatctttagttctagtcgttttagtaccgccctacaagagaatgccgcgacatctttgccttatctgcctgtcatcattcacactcaacaagaggcgatgattagtggctgcaatggtttttattttggcaacgagagtccgacattccagatggaattaaccgaacaatatccgagtaaggcgttattattaattgccgaacaaaataccgagtgcattattggtagcgccttttgtctgatcatccacaataatgacgtcagatttgccgtaaacctggatgccttaagccgtagcggtgtaaaggtcaacccggatgtcttaatgctcgcacggaagaaaaatgatggataacgataattctcttaataagcgccccacgtttaaaagagcattacgcaacatcagtatgaccagcatatttatcactatgatgctgatctggttgctgctttccgtgaccagcgtgctgaccctgaaacagtacgcgcaaaaaaacctggcactgacagcagcaacaatgacttacagtctggaagcagctgtcgtttttgccgatggccctgcagcaactgaaacactggcagcgctgggccagcaagggcaatttagtactgcagaagtacgtgataagcagcaaaatattctggcatcctggcattacacccgtaaggatccaggcgatactttcagtaatttcataagccactggctcttccctgcccccatcattcagccgattcgtcacaatggtgaaaccattggcgaagtacgcttaaccgctcgcgacagtagtatcagccattttatctggtttagcctcgccgtactgaccggttgtattctgctggcaagtggcatcgcaattaccctcacccgccatttgcacaatggcctggtagaagcgctgaaaaatatcaccgatgtcgtacatgatgtgcgttccaaccgcaatttttcccgacgagttagcgaagaacgtatcgctgagtttcaccgcttcgctctcgacttcaacagtctgctggatgaaatggaagagtggcagcttcgtttacaggctaaaaatgcgcagcttctacgtaccgcgctacatgacccattaaccgggctggctaaccgcgcagcgtttcgtagcggcatcaacacgttgatgaacaattccgatgcccgaaaaacgagcgcgttactatttcttgatggcgataatttcaaatacatcaatgatacctggggtcatgcgacgggcgatagagtcttgattgaaatcgcaaaacggttagctgaatttggcgggctgcgacataaagcataccgcctgggcggcgatgaattcgctatggtgctctatgatgtacagagcgaatctgaagtgcagcagatatgtagtgcactgacacaaatctttaatctcccgtttgatcttcataatggccatcagaccaccatgacattaagcattggttacgcgatgaccattgagcacgcctctgcggaaaaattacaagagcttgccgatcacaatatgtatcaggccaaacaccagcgtgccgaaaagctggtgagataacaaggatatatcgatatgataaagcacctggtagcacccctggttttcaccagtctaatactgactggctgccagtcccctcagggaaagtttactcctgagcaagtcgccgctatgcaatcttatggatttactgaatccgccggcgactggagcctgggcttaagtgatgccattctgttcgcaaaaaatgactacaaattgctcccggaaagccagcaacagatccaaaccatggcagctaaattggccagcacagggctaacacatgcccgtatggatggacacaccgataactatggtgaagacagttacaacgaaggcttaagtttgaaacgggcgaatgtcgtggccgatgcatgggctatgggtggacaaattccacgcagcaatctcaccacacagggtttaggaaaaaaatatcccatagccagtaacaagaccgcccagggccgcgccgagaaccgccgcgtcgcagtggtgattactaccccttaaaacaccagcaaacagataaaaaagggccagccaattggccagcccttcttaacaggatgtcgcttaagcgaaatcttagttaagacgctctttgatacgagcagccttaccagtacgctcacgcaggtagtacagtttagctttacgaacagcaccacgacgtttgacagaaatgctgtcaactaccggagagtgagtctggaagacacgctcaacgccttcgccgttggaaattttacgaacagtgaatgcagagtgcagaccgcggttacgaatagcgataaccacgccctcgaatgcctgcagacgttttttggaaccttcaacaacccatactttcacttccacggtatcacccggacggaaggaaggtacgtcctgcttcatctgctcttgttcaagttgcttaataatgttgctcataatttaatctcttatcctgggtaaactgatatctcgggggcttacgccatcccatcatgtttatgttgctgttgtgcgtgttccgttttgaactccgccagcaaccttgcttgctcttcagtcagagccaggttttccagaagttcaggtcttctaagccaggtacggcccaggctctgtttcaaacgccagcgacgtatctcggcatggttgccgctcagtaacactggcggaacttccatcccttctaacacctcaggccgcgtatagtgcgggcaatccagcaatccttcagcaaaggaatcttccgttgcgctggcttcatgtcccagtactcccggaataaaccgggaaacggagtcaatcagcgtcattgctggtaactcaccaccactgagaacgtaatcgccgatactccattcttcgtcaatttcggtttggatcacgcgctcatctataccttcgtagcgaccgcacaccagaatcaatttttgattcgttgccagttcgctgacgcccgcttgatcaagcttgcgtccctgtggactcagataaatcacctttgcgccttcacccgccgcggcttttgctgcatgaatggcgtcccgcaagggttgcaccatcattaacatccccggtccgccgccgtaaggacgatcgtccacggtacggtgccggtcatgcgtgaagtcgcgaggactccagctctggatgctcagcaggccatttttaactgcccggccagttaccccgtaatcggtaattgcgcggaacatttcaggaaacaggctaattatgccaatccacatagcgccgtcttttaccgtttatccggtggtttaaaaaccaggatcccaatctacttcgatactacgagtagtgagatcgactttcttgataacctgcccatcgaggaacggtacgagacgttccttgataccaaacgcatctttcaggtttgccttaatgacgagaacgtcattagatccggtttccatcatatcgacgactttaccgagatcgtagccttcagtggttactacctggcagcccatcaggtctttccagtagtagtccccctcttcaagctgaggcagctggctactatccacgacaatttcacaattcgtcagcaggttcgccgcatcacgatcgtcaacgcctttcagcttgatgatcatgtcctgattgtggtgcttccagctttccagctggacttgctgccactgacccgccttctggataaaccagggctgatagtcaaaaatgctttcggcgtcttcggtggaagaaaacactctgagccacccacgaataccgtaagagctacccatttttcccaaaacgatgggatcaacaggtgcttgcgcggtgagttgtttgctcatcatgaccaccgtgacagattaagctgctttgtttacttctttgatcagcgcagcaacgcgatcagaaatagttgcgccctggccaacccagtgagcgatgcgatccagatccaggcgagtgccttcttctttttcgctagcgattgggttgaagaaaccaacgcgctcgatgaagcgaccgttgcgtgcattacggctgtcagcgacaacaacctggtagaacggacgctttttagcgccgtgacgtgctaaacgaatagttaccataacatcctcttgtgtgaataaaacaaccggaccccatcgaggaacggagtccggtgtcatattaaaagcccgaaaattttactcatttttgcgggaattgcaatcaacagttgctaactctgctgtaaaaggccgtcggcggtgcagccagtttggtgccggagtgcgcgcagtcaccggagcgtacacgcagtacgtgaggatgacgagcacatcccggtgccaaaatggcaaacaagccaggccgattagcgaccagggaagcctgggggcatcatacccttcatgcttctcatcatcttcgccattccgcccttcttcattttcttcatcatgcgctgcatgtcgtcgaactgtttcagaagacggttaacgtcctgcacctgcataccgcaaccggcagcaatacggcgtttacggctacctttgatgatttctggcttagcgcgctctttcatcgtcatgctgttgatgatggcttccatacgcaccagcactttatcgtccatctgactcttgacgttatccgggatctgccccatgcccggcagcttgcccatcagactagccatgccgcccatatttttcatctggcgcagctgctcaagaaagtcgttgagatcgaagccgtcaccttttttcagcttgctggctaatttctctgcctgcgcgcggtcaactttgctttcgatatcttcgatcaggctcagtacgtcgcccatgccgagaatacggctcgcgatgcggtccggatggaacggctccagcgcctcagttttctcgccaacaccgaggaacttgatcggtttgccagtgatgtgacgaatagagagcgccgcaccgccgcgggcatcgccgtccactttggtcaacactacgccggtaagcggtaacgcttcattgaatgcttttgccgtattggccgcatcctgaccggtcatggcgtcaaccacaaacagggtttcaaccgggttaatgctcgcatggacttgtttgatctcgtccatcatcgcttcgtcaacgtgcagacgaccagcggtatccaccagcagcacgtcgtagaatttcagtttggcttctttcagcgccgcgttaacgatatctaccggcttctgaccaacatcagaagggaagaaatcaacgcccacctgctctgccagcgtctcaagctgtttgattgccgccgggcgataaacgtcggcagaaaccaccagcactttcttcttgtgcttctcgcgcaggaacttaccgagtttaccaacgctggttgttttaccggcaccttgcaggcccgccatcagtacgaccgcaggcggttgcgcagccaggttcagggtctggttctcttcgcccatcgccgcaaccagttcgttacggactattttgacgaactcctgccccggcgtcaggctcttattaacttcatgaccaaccgctttctcttttacgcgattgataaactcacgcactaccggcagagctacgtccgcctccagcagcgccatgcgcacttcgcgcagcgtatcttttacgttgtcttcagtgaggcgtccacggccactgatattgcgcagcgtgcggctcaaacgatcggttaaattatcaaacattgtctctcgcctggggtggaaacggttggccgcaatcgcgacacatcatcagtattttgccgcagtataacatgaaggcgtctttgttgttatgcaacggttggagcagcgtagtcctgacgctatactgcttctctttcttattgctcaaactgtcgacatcactatgcccgtttttgctctgctcgcgcttgtcgcctactccgtcagtcttgcgctgattgttcccggtctgctgcaaaaaaacggcggctggcggcgcatggctattatttctgcggtcattgcgctggtctgccacgcaatcgctctggaagcccgcatcctgcccgacggtgatagcggacaaaacctcagcctgctgaacgttggtagtttggtcagtttgatgatctgtacggtaatgaccattgtggcttctcgcaatcgtggctggctgctgctacccattgtctatgcctttgcgcttatcaacctggcgctggcaaccttcatgcccaatgaatacatcacccatctggaagctacgcctgggatgctggtgcacattggcttaagcctcttttcctatgccacgctaattatcgccgccctgtacgcgctgcaactggcgtggattgattaccaactgaagaacaagaagctggcgtttaaccaggaaatgccgccattgatgagtatcgagcgtaaaatgttccacatcacgcagattggcgtggtgctgctaacgctcacgctttgcactggcctgttctacatgcacaacttatttagcatggaaaatatcgacaaggctgtgctctctatcgtggcgtggtttgtctatattgtgctgctgtggggacattatcatgaaggatggcgtggacgccgcgtcgtctggtttaacgttgcgggcgcggtaattctgacactggcctacttcggcagccgaattgtccagcagttaatcagctaaacccagaaaaggagtttcccctggaacacatttctactactacgttgatcattattctgatcatcatggtggtcatttcagcctatttttccgggtccgaaaccggaatgatgaccctcaaccgctatcgtctgcgacatatggcgaaacagggtaatcgcagcgccaaacgcgtcgaaaaattgctgcgtaagccagaccgcctgataagcctggtgttaatcggcaataacctggtcaatattcttgcctccgcgctcggcactattgttgggatgcgtttgtacggcgatgcgggcgtggcaattgcgactggtgtgctgacttttgtcgtactggtatttgctgaggtattgccgaaaaccattgccgcgctgtacccggaaaaagtcgcttatccgagtagttttctgctggctccgctgcaaattttgatgatgccgctggtctggttgctgaatgctatcacccgtatgctgatgcgcatgatgggtatcaaaaccgatatcgtggttagcggctctttgagcaaagaagagttgcgcactatcgtgcacgaaagtcgcagtcaaatttcccgtcgcaatcaggatatgctgctgagcgtgctcgatctggaaaaaatgaccgttgatgacatcatggtgccgcgcagtgaaattatcggtattgatatcaacgatgactggaaaagcattctgcgccaactctcccacagtcctcacgggcgcatcgtgctctaccgtgatagcctggacgacgccatcagtatgctgcgagtacgtgaagcctggcggttgatgagcgagaaaaaagagttcaccaaagaaaccatgctgcgcgccgcggacgagatctattttgtgccggaaggtacgccgctcagcacgcagttggtaaagtttcagcgcaacaaaaagaaagtcggcctggtcgtcaacgagtatggagacattcaggggctggtgacggttgaagatattctggaagagattgtcggcgatttcactacgagcatgagcccaacacttgccgaagaggtcacgccgcaaaacgacggtagcgtgattatcgatggcaccgccaacgtgcgggaaatcaacaaagcctttaactggcatctaccggaagatgatgcccgcacggttaatggcgtcattcttgaggcactggaagagatccctgtcgcaggcacccgcgtgcgtattggcgagtacgatatcgatattctcgacgtacaggacaatatgattaagcaggtaaaagtttttcctgtgaaaccgctgcgcgagagtgtggcggagtaacgaaaacggcccggcattcgcatgcagggccgtgaattattacgaaagcagaaattaagcttttgctttcgctacagtaaccatcgccgcacgaatcgtacgaccattcagcgtataacccttctgcataatgcccagtacgttacctggcgcaacgtcatcagattccaccattgcgatggcctgatgcacattcgggtccagtgggacgttagtttcggcgatcacttcaacgccaaacttacgcacaacatccagcatgctcttcagcgtcagctcaatgccttcaaccatcgcagacatatccgggttagctttatcagccacttccagcgcacgatccaggctatcaatcaccggcagcaattcgttgatgaatttctccagcgcgaatttgtgggctttttcaatatccagttcagtacgacgacgcaggttttccatttcggcttttacacgcaaaatgccgtcacgttcacgggtctgggcttcagccagctgagcttcgagattcgcaactttttcatcgcgcggatccacctgctcagcagaagcttctggctcaactgcctcaatctcttcgtgctgatccatgataatttcttccggggcttgcccctcaggcgttttctgttctttactactcatgaatttctccgcgtttttttcgcattcatctcgctaacttcgcttattatggggatcagtttcagggtttcaagggaagcactcacattgtcatcaatcttcgcaacaaggacctcggaaaaatgaataatcatttcaagtgtattggcattgtgggacacccacggcaccccactgcactgacaacacatgaaatgctctaccgctggctgtgcacaaaaggttacgaggtcatcgttgagcaacaaatcgctcacgaactgcaactgaagaatgtgaaaactggcacgctcgcggagattgggcaactagctgatctcgcggtagtcgttggtggcgacggtaatatgctgggcgcggcacgcacactcgcccgttacgatattaaagttattggaatcaaccgtggcaacctgggtttcctgactgaccttgaccccgataacgcccagcaacagttagccgatgtgctggaaggccactacatcagcgagaaacgttttttgctggaagcgcaagtctgtcagcaagattgccagaaacgcatcagcaccgcgataaatgaagtggtgcttcatccaggcaaagtggcgcatatgattgagttcgaagtgtatatcgacgagatctttgcgttttctcagcgatctgatggactaattattagcacgccaacaggctccaccgcctattccctctctgcaggcggtcctattctgaccccctctctggatgcgattaccctggtgcccatgttcccgcatacgttgagtgcacgaccactggtcataaacagcagcagcacgatccgtctgcgttttagccatcgccgtaacgacctggaaatcagttgcgacagccagatagcactgccgattcaggaaggtgaagatgtcctgattcgtcgctgtgattaccatctgaatctgattcatccgaaagattacagttatttcaacacattaagcaccaagctcggctggagtaaaaaattattctaattttacgccagcctctttactgtatataaaaccagtttatactgtacacaataacagtaatggtttttcatacaggaaaacgactatgttggcacaactgaccatcagcaactttgctatcgttcgtgagcttgagattgattttcatagcggcatgaccgtaataactggcgagaccggcgcgggtaaatctattgcaatagatgccctcggtctttgtctcggtggtcgcgctgaagccgacatggtgcgtaccggcgctgctcgcgctgacctgtgcgcccgtttttctctgaaagatacgccagcggctctgcgctggctggaagaaaaccagcttgaagacgggcatgaatgtttgcttcgtcgcgtgatcagcagcgatggtcgctcccgtggtttcatcaacggtacagctgttcctctgagtcaactgcgcgaactgggtcagttgctgattcagatccatggtcagcacgctcatcaattactcaccaaacctgagcaccaaaaattcctgcttgatggctatgccaatgaaacctctctactgcaggaaatgaccgcacgttatcagttgtggcatcaaagctgccgtgacctcgcgcatcatcaacagttaagtcaggaacgcgccgcccgtgcggaactgctgcaataccaattaaaagaacttaacgaatttaatccgcagcccggagagtttgaacaaatcgacgaagagtacaaacgtctggcgaacagcggtcaattgctgaccaccagccagaatgcattggcattaatggccgacggtgaagacgcaaacctgcaaagtcagctttacacggctaaacaactggtgagcgaattgattggcatggacagcaaactgtccggcgtacttgatatgctggaagaagctaccatccagattgctgaagccagcgatgaactgcgccactactgcgatcgtctggatctcgatcccaaccgactatttgaacttgaacagcgcatcagtaaacagattagcctggcacgtaaacatcacgtcagccctgaggcattgccacagtattaccagagcctactggaagaacagcagcaactggacgatcaggccgacagtcaagaaacgcttgcgctggcggtaacgaaacatcatcagcaggcactggaaatcgcgcgcgcattacaccaacaacgccagcaatatgcagaagaacttgcacagctgatcaccgacagtatgcatgcgctcagtatgccgcatgggcagtttacgatcgatgttaaatttgacgagcatcacctgggcgctgacggtgccgatcgtattgagtttcgggtaaccaccaacccaggtcagccaatgcagcctattgccaaagtcgcatccggtggtgaattgtcccgcatcgcactggcaatccaggtcatcacggcgcgtaaaatggaaaccccggcactgatttttgatgaagtggatgtagggattagcggtccaacagcggcagttgtcggcaaactgctgcgtcaactcggcgaaagtactcaggtgatgtgtgttacccacctgccacaagtcgcgggatgtggtcatcaacactattttgtcagcaaagaaaccgatggtgcgatgacagaaacgcatatgcaatccctgaataaaaaagcgcggttacaagagctggcgcgcctgcttggtggcagtgaagtcacacgtaatacactggcgaatgcgaaagaactgcttgcagcgtaaacttttttcctgcttcacggtcagagtaaacagcaaaacgccgtaagaccggaaagcaaaaggttttaaagtgatgaaaggtctattatcatcggcatattacagatgagccacgtactgctcgggcccgaaaaggaatcaaatcactatgcgctgtaaaacgctgactgctgcagcagcagtactattgatgttgaccgcaggctgttccactctggagcgagtggtttaccgtcctgacatcaaccaggggaactatctgaccgctaacgacgtatccaaaatacgtgttggcatgacgcaacaacaagttgcgtacgcattgggtacaccgctgatgtccgatccatttggtacgaatacctggttctatgtcttccgccagcaaccaggtcatgaaggtgtaactcagcaaacgctgacgctgacctttaacagtagcggtgtgttgaccaatattgataacaaacctgcgctgagtggtaactaataataaagttgctctcaaagacgttaaaaaaggtgctcaatgagcaccttttttctgtctgttatttattcgcacttttttctgctcgttgcctgcgaagctctttcggatcggcaatgagagggcgataaatctccacccgatcgccatcatgcacactatcgcttagttttgccggacggctgtaaatgccgactttgtttttagttaaatcgatatcggtacgcaattccagcaagccactggcgcgaatagcttcttcaaccgtcgcgccctcctgcagcgtcactcgctgcaggtactgcttctcaggtagcgcataagccacctcaacggcaattttacctggcactgtaaacctctttcgcacgaaccgtaaaagcctggaccatattagccgccagctctttaaacacgcgaccaaaggcgagttcaatcaacttattggtaaactcaaagtcgagatgaaactcgatacgacacgcctcctggctcagcggcgtaaacttccatccaccaatcaatttcttgaacggcccatccaccagattcataagaatactttggttactggtcaactggttgcgggtagtaaacgttttgctgatcccagccttagagacatctaccgccgcagtcatctgcccaggagtggactccagaatccgacttccggtacaacccggcaaaaactgaggataagactgaacgtcattcactaactgatacatttgctccgcgctgtagggtaccagtgcggtccggctaatctgaggcataacaatttccatcaacaaaaatccaacaaataatatcatttatcctgctgtaaaaaaaacgctatcccggcgctgggtaacatcgggttcatgctaagatagagccttgtcccccgcaggattgatatggggtgttttcgatttcagattaccgatgattcacgacgcttatgacgaagaaaaaagcacataaacctggtagtgcgaccatcgcgcttaacaagcgcgcccgtcacgaatactttatcgaagaagagttcgaagcgggacttgccctgcaaggctgggaagttaaatccctgcgcgcaggaaaagccaatatcagcgacagctacgtccttctgcgtgacggagaggcatttctgtttggcgctaacatcacgccaatggccgtggcctccacgcatgtggtgtgcgatcctacccgtacccgcaagttacttctcaaccagcgcgaactggacagtttgtacggtcgcgtcaatcgagaaggctataccgtagtggcgctctccctgtactggaaaaatgcctggtgcaaagtgaaaatcggcgtcgccaaaggtaagaaacagcacgataaacgtagtgatatcaaagagcgcgaatggcaggtggataaagcacgtatcatgaaaaacgcccaccgttaaacctgcactccaattattgaccagttcctcaccgcgcctccctctccggcggcgcgaatgaacatcttattggctatcacatccgacacaaatgttgccatcccattgcttaatcgaataaaaatcaggctacatgggtgctaaatctttaacgataacgccattgaggctggtcatggcgctcataaatctggtatacttacctttacacattggggctgattctggattcgacgggatttgcgaaacccaaggtgcatgccgaggggcggttggcctcgtaaaaagccgcaaaaaatagtcgcaaacgacgaaaactacgctttagcagcttaataacctgcttagagccctctctccctagcctccgctcttaggacggggatcaagagaggtcaaacccaaaagagatcgcgtggaagccctgcctggggttgaagcgttaaaacttaatcaggctagtttgttagtggcgtgtccgtccgcagctggcaagcgaatgtaaagactgactaagcatgtagtaccgaggatgtaggaatttcggacgcgggttcaactcccgccagctccaccaaaattctccatcggtgattaccagagtcatccgatgaagtcctaagagcccgcacggcgcaagccctgcgggcttttttgtgccctcaatttgtcccgcgaagtccgaagagaactaattaaatccgaaccttttaggcccattgataggcccaacgaaaagctctattgtttacgttgggctaaacgcagggagactccccacctttgaaaacaggatgtagcgatgaaacttaacgacagtaacttattccgccagcaggcgttgattaacggggaatggctggacgccaacaatggtgaagccatcgacgtcaccaatccggcgaacggcgacaagctgggtagcgtgccgaaaatgggcgcggatgaaacccgcgccgctatcgacgccgccaaccgcgccctgcccgcctggcgcgcgctcaccgccaaagaacgcgccaccattctgcgcaactggttcaatttgatgatggagcatcaggacgatttagcgcgcctgatgaccctcgaacagggtaaaccactggccgaagcgaaaggcgaaatcagctacgccgcctcctttattgagtggtttgccgaagaaggcaaacgcatttatggcgacaccattcctggtcatcaggccgataaacgcctgattgttatcaagcagccgattggcgtcaccgcggctatcacgccgtggaacttcccggcggcgatgattacccgcaaagccggtccggcgctggcagcaggctgcaccatggtgctgaagcccgccagtcagacgccgttctctgcgctggcgctggcggagctggcgatccgcgcgggcgttccggctggggtatttaacgtggtcaccggtagcgcgggcgcggtcggtaacgaactgaccagtaacccgctggtgcgcaaactgagctttaccggtagcaccgaaattggccgccagttaatggaacagtgcgcgaaagacatcaagaaagtgagcctggagctgggcggtaacgcgccgtttatcgtctttgacgatgccgacctcgacaaagccgtggaaggcgcgctggccagcaaattccgcaacgccgggcaaacctgcgtctgcgccaaccgcctgtatgtgcaggacggcgtgtatgaccgttttgccgaaaaattgcagcaggcagtgagcaaactgcacatcggcgacgggctggataacggcgtcaccatcgggccgctgatcgatgaaaaagcggtagcaaaagtggaagagcatattgccgatgcgctggagaaaggcgcgcgcgtggtttgcggcggtaaagcgcacgaacgcggcggcaacttcttccagccgaccattctggtggacgttccggccaacgccaaagtgagcaaagaagagacgttcggccccctcgccccgctgttccgctttaaagatgaagctgatgtgattgcgcaagccaatgacaccgagtttggccttgccgcctatttctacgcccgtgatttaagccgcgtcttccgcgtgggcgaagcgctggagtacggcatcgtcggcatcaataccggcattatttccaatgaagtggccccgttcggcggcatcaaagccagcggtctgggtcgtgaaggtagcaagtatggcatcgaagattacttagaaatcaaatatatgtgcatcggtctttaactggagaatgcgaatgaacagcaataaagagttaatgcagcgccgcagtcaggcgattccccgtggcgttgggcaaattcacccgattttcgctgaccgcgcggaaaactgccgggtgtgggacgttgaaggccgtgagtatcttgatttcgcgggcgggattgcggtgctcaataccgggcacctgcatccgaaggtggtggccgcggtggaagcgcagttgaaaaaactgagccacacctgcttccaggtgctggcttacgagccgtatctggagctgtgcgagattatgaatcagaaggtgccgggcgatttcgccaagaaaacgctgctggttacgaccggttccgaagcggtggaaaacgcggtaaaaatcgcccgcgccgccaccaaacgtagcggcaccatcgcttttagcggcgcgtatcacgggcgcacgcattacacgctggcgctgaccggcaaggtgaatccgtactctgcgggcatggggctgatgccgggtcatgtttatcgcgcgctttatccttgcccgctgcacggcataagcgaggatgacgctatcgccagcatccaccggatcttcaaaaatgatgccgcgccggaagatatcgccgccatcgtgattgagccggttcagggcgaaggcggtttctacgccagcagcccagcctttatgcagcgtttacgcgctctgtgtgacgagcacgggatcatgctgattgccgatgaagtgcagagcggcgcggggcgtaccggcacgctgtttgcgatggagcagatgggcgttgcgccggatcttaccacctttgcgaaaagcatcgcgggcggcttcccgctggcgggcgtcaccgggcgcgcggaagtaatggatgccgtcgctccaggcggtctgggcggcacctatgcgggtaacccgattgcctgcgtggctgcgctggaagtgttgaaggtgtttgagcaggaaaatctgctgcaaaaagccaacgatctggggcagaagttgaaagacggattgctggcgatagccgaaaaacacccggagatcggcgacgtacgcgggctgggggcgatgatcgccattgagctgtttgaagacggcgatcacaacaagccggacgccaaactcaccgccgagatcgtggctcgcgcccgcgataaaggcctgattcttctctcctgcggcccgtattacaacgtgctgcgcatccttgtaccgctcaccattgaagacgctcagatccgtcagggtctggagatcatcagccagtgttttgatgaggcgaagcagtaacgccgctcctatgccggaggcgacgctgcgcgtcttgtccggcctacggggatccaggtcggataaggcgtttacgccgcatccgacaatctgtacgtgaacaggaagaaatctatgttggccgggtaaggcggagccgctctccggcaaaaagaatcaataacaattatacgcgtgacccggcgcgggaaatgtcggggcgctctcccaagtgacacactttcgagaggattcaggatggggcaaagtagccaaccacatgagttaggcggcgggctgaagagtcgccacgtcaccatgttgtctattgccggtgttatcggcgcaagtctgtttgtcggttccagcgtcgccatcgccgaagcgggcccggcggtattactggcctatctgttcgccgggctactggtggttatgattatgcggatgttggcggaaatggcggttgccacgcccgataccggtagcttttccacctatgccgataaagccattggtcgctgggcgggctataccatcggctggttgtactggtggttttgggtactggttatcccgctggaagccaacatcgccgccatgatcctgcacagttgggttccaggcattcccatctggttattttccctcgtcattaccctcgccttaactggcagtaacttattaagcgttaaaaactacggcgaatttgagttctggctggcgctgtgcaaagtcatcgctatcctggcctttattttccttggtgcagtcgcaattagcggtttttacccgtatgccgaagtgagcgggatcagtagattgtgggatagcggcggctttatgcccaacggtttcggtgcggtattaagcgcgatgttgatcaccatgttcagctttatgggcgcagaaattgtcaccattgccgccgcggaatccgacacgccggaaaaacatattgtccgcgccaccaacagcgttatctggcgtatttctatcttctatttatgttctatttttgtcgtcgtggcattaattccgtggaatatgcccggactaaaagccgtcggttcttatcgcagcgtactggaattgctcaatattccccatgcgaaattaatcatggactgcgtgatattactttccgtaaccagttgcctgaacagcgcgctgtataccgcgagtaggatgctctactccttaagtcgtcgcggtgatgctcccgcggtaatgggtaaaatcaaccgcagtaaaaccccgtacgtggcggtgttactctccaccggcgcggcattcttaacggtggtggtgaactattacgcgcctgcgaaggtatttaaatttctgatcgacagctccggcgctatcgccctgctggtttatttagtcatcgccgttagtcagttgcggatgcgcaaaattctgcgagcagaaggaagcgaaattcgcttgcgaatgtggctttatccgtggctcacctggctagtcatcggctttattacctttgtgttggtagtgatgctattccgtccggcgcaacagttagaagtgatctccaccggcttattagcgatagggattatctgtaccgtgccaattatggctcgctggaaaaagctggtattgtggcaaaaaacacccgttcataatacgcgctgatcatgatcaggagtcacaccatgaccattacgtctctggatggctatcgctggctgaagaacgatattattcgcggtaattttcaaccggatgaaaaattacgaatgagtttgctgacaagccgttatgcacttggcgttgggccgttacgggaagctcttagccaactggtggcggaacggctggtcacggtggtgaatcaaaaagggtatcgggtggcgtctatgagtgagcaggagctgctcgatattttcgacgcccgcgccaatatggaagcgatgttagtgagtctggcgattgcccgcggtggcgatgagtgggaggcagacgttctcgcaaaagcgcatctgctgagtaagcttgaggcctgtgacgccagcgagaaaatgcttgatgagtgggatctgcgtcatcaggcgtttcatacggcaattgtggcgggctgtggttctcactatttgctgcaaatgcgtgaacggttgtttgatctggcggcgcgttatcgatttatctggctgcggcgaacggtgcttagcgtggaaatgctggaggataaacacgatcagcaccagaccctgactgcggcggtactggcgcgagataccgcgcgcgccagtgagttaatgcgccagcatttactgacgccaattcccattatccagcaggcgatggctggcaattaattactcttccggaatacgcaacacttgccccggataaattttatccgggctttttagcatcggtttattcgcttcgaagattttattgtacagattagcgttaccgtagacctgtttggaaatggcactcagagtgtcgccagacttaacggtataaaactggctggcagtggctggtgtcgccgttttcacctgatcatcgacactggcaataccggaaatattccccaccgcaacaaggattttctccttcgcctcctgactcaggccgtcaccagtgaccgtcgctttgccgtcggcaatttgaatattcactttatcggcatccggtataccggttttgttcagatgctcctgcaccttcttcgcctgatcgtctttatcgtgctgacctgtaaccgcgtcccagagtttttctccggcatctttcacaaaattgaacagacccatagctacctcattcgttaacggaaacactcagaaagtgtagcagaggaacgcggcgcgttaacgccgcggggatgagcacaggtttaatcgcgggtttgcacccagaacgcgtgaatcaaaccggggatatacccaagcagtgtcaacagaatattaataatgaacgcccaaccgaaccctttaccgagcagcacgccgagcggcggcagaatgatggtgatgacgattctccagaaacccatatgtactccctataagaaaattactcattgtttaaaaagagattttatctcttaagcgtagtaattttagcggagcctgccagtttcagcttacgcttttactctcatttacgctgctgaggctggtatatgttgcatttttagtttagagtttacttaatttagaaaatacttaaataaatatgactgaactcgcgcaattacaggccagtgccgaacaggcagcggccttattgaaagcaatgagccaccctaaacgattgctgattctgtgcatgcttagcggttcccccggcaccagcgcgggagagctgacgcgcattaccggactgagtgcctctgcgacaagtcagcatctcgctcgtatgcgggacgaagggcttatcgacagccaacgggatgcccaacgcattctatattccattaaaaatgaggcggtaaatgccattatcgccaccctgaaaaatgtctattgtccgtaaggagtcactatggctttgacaaccattagcccgcatgatgcacaagaattaatcgcacgcggcgcaaagttaatcgatattcgtgatgctgatgaatatcttcgtgaacatattcctgaagcagatctggctccattatccgtgctggaacagagtggtcttccggctaaattacgtcacgagcaaattatattccactgccaggcaggtaaacgcaccagtaataatgccgataaattagcagcgattgccgcccccgcagaaatctttttactcgaagatgggattgatggctggaaaaaagcaggattgccagtagcggtaaataaatctcaacccttgccgttaatgcgccaggtgcagatcgctgcgggtggtttaatattaatcggcgttgtactgggttataccgtaaatagcggtttcttcttattaagtggctttgttggtgccgggttactgtttgcaggaatcagcggtttttgtggaatggcaaggttgttagataagatgccgtggaaccaacgagcttgagaagcgacgccggacgcgccctagcagcgacatccggcctcagtaattagatcaggaaatcgtcgagagatttaccttctgccagcgcctgagcaattggcttcggtgtacggccctgaccggtccaggttttagtttcaccgttaacatcggtgaatttatatttcgccggacgcggctggcgttttttaccagcgcgtggtgcagcagcagagctattacccaataactcttccgggttaattccgtcagctttcatcagctccagccaggtgctaattttttcctggcgctctgccagttcacgctgctgctgttcttcttcttcacgtctttctttagtgacaaccctgaatttttcgagcatttcttcaagaacgtcaatggagaattcgcgagccatcgcacggagggtgcgaatgttatttaaactttgtaacattacggacataataaagaaaaccttttaacgccaaaacaaaaaaagtatttcgtcgcgtagtgtaagcgatcacttattatatttccacaaaatttaatctatttacagtcctgcgcgagattatttcagctgttattttctgaaactctcagaataatttcaagattatatattagccattttgatgagtaatttagattattggtgaacagagcggcgctctctgctcgctaattccgcaagcctgacaaaatcaaagtgaataaaaatgcaatataacagaataaaagaaaacatccatcactggtgctttctgctgttaatgtacattgtctggcataaaaaatgctgaaaatgacccagctactacatacaccgaattctctacgcttatagcgttacctcacccccaaactttcattagtgatattaaaggtaaggccatatctaattgatttaattaaaaataaatcatatcggcatgtaaaaatccacaatgtacaaaaaacgagccgttacggaatattttatctacaaaaactgactaaataaaaatttttcactaattgattagtcatagccagcgatatacgctatgcgaaaatgcagatggcaatgagatccactgctttcatctccattaacatcccattacgcttttattaaggagcattagcatgttcagtccgcagagtcgcttgcgtcatgcagttgcagatacgttcgcgatggttgtttactgttctgtcgtgaacatgtgtattgaagttttcctctccggaatgagcttcgaacagtctttttattccagattggtagcgattccggtgaacatcttaattgcatggccatacggtatgtaccgtgatctgtttatgcgcgcggcacgcaaagttagcccgagcggctggataaaaaatctggcggatatcctggcttatgtgacgttccagagtccggtgtatgtggcgatcttgttagtggtgggcgcagactggcatcagattatggcggcggtcagtagtaacatcgttgttagcatgttgatgggggcggtttatggctacttcctcgattattgccgccgactgtttaaagtcagccgttaccagcaggtaaaagcctgactcttcttttcgcgactggcatcgccagtcgcgtctttaactggcttcgccaaataaaccattcaaataacgttcaagcgcaacacggctactaaagccatgcgggataccgtaatgctcgtgtcgctcgcctgctaaatagagcggaaattgctggtaatgatcgcaagttttaatatcggaagcgggttcagccagtgtgctactgcgttcttttaatgttggatgaattaccagagcggtacgtcccattcgcgcttcgcgattaacatagacataattttccccacggcggtaaccatacgctttctgggttaccacatcgacagtaaaaccgactttttcaagtacgcgcgccacctcgtctggtcgtaaatacatatttgatcctcgttattatcaaccgcgggcctaccttacctgattgcgcattcacaacgctttcagaaaagtccataaagccgcgatgaacctcagttaagaaaattatggtctacactgaaaattacatcgaattctaatgggggatcatatgtttaaccgaccgaaccgcaacgacgttgatgatggcgtgcaggatatccagaatgatgtcaatcaattagctgacagcctcgaatctgtattgaagtcctggggcagcgacgccaaaggggaagctgaagccgcacgcagtaaagctcaggcattgctgaaagaaaccagggcgcgaatgcatggtcgtactcgcgtccagcaagccgcgcgcgatgccgttggctgcgcggattcttttgttcgtgaaagaccctggtgtagcgtgggtacagcagctgcggtaggtatttttatcggcgcactgttaagcatgcgcaaaagctaatgcaaaaatgataataaatacgcgtctttgaccccgaagcctgtcttcggggtttctttttgcctggtgaatcacaaaaatccccctaccccgtcacgctcatatccagggtaatttcgaccactatttgctatatattgtgtggttgaatcttttttcaactacatctagtatctctgtatcaacagagagacaacccgacgcgtatcatcgcgccgtatcttcattttaaacggaaatacgaatcatgcgcattactatttacactcgtaacgattgcgttcagtgccacgccaccaaacgggcgatggaaaaccggggctttgattttgaaatgattaatgtcgatcgcgttcctgaagcggcagaagcgttgcgtgctcagggctttcgtcagttgccggtagtgattgctggcgatcttagctggtctggtttccgtccggacatgattaaccgtctgcatccagcgccacacgcggccagtgcatgagccagctcgtctacttctccagcagctccgaaaacacgcagcgttttatcgaacgtttaggtctgcccgcggtgcgcatcccgctcaatgagcgggaacggattcaggtagacgagccttacatcctgatcgtgccctcttacggcggcggcggtacggctggcgcggtgccacgacaggtaattcgctttttaaacgacgagcacaaccgggcgttgcttcgcggcgttattgcttctggtaatcgcaactttggtgaggcgtatggccgcgccggagatgtgattgcccggaaatgcggcgtgccgtggctgtaccgttttgaactcatgggtacgcaaagcgatatcgaaaacgttcgtaaaggagtaaccgaattttggcaacgacaaccgcagaatgcctgacgcaggaaacgatggattaccacgcgctgaatgcgatgcttaacctctacgatagcgcaggtcgcattcagttcgataaagaccgccaggccgttgacgcctttattgcgacgcatgtgcgtccgaacagtgtgaccttcagtagccagcagcagcgcctgaactggctggtcaacgaaggttactatgatgaaagcgttcttaatcgctactctcgcgactttgtcattacgctgtttacccacgcacacaccagcggttttcgtttccagacattcctcggggcatggaagttttacaccagctatacgttgaagacattcgacggtaaacgttatctggaagattttgccgatcgagtaacgatggtggcgctgacgctggcacaaggcgatgagacgctggcgttgcaactgaccgatgaaatgctgagtggacgctttcagccagccacgccaacattcctcaactgcggtaagcagcagcgcggcgaactggtttcctgttttttgctgcgtattgaagacaatatggagagcattggtcgggcggtaaattccgcactgcagctgagcaaacgcggcggcggcgtagcatttttgctgagcaatctgcgagaagcgggcgcgccaattaaacgtattgaaaatcaatcttctggcgtaattccggtgatgaaaatgctggaagacgcattttcctatgccaaccaactcggcgctcgtcagggggctggtgcagtctatttacatgctcatcatcccgatattctgcgttttctcgacacgaaacgggaaaatgccgacgaaaaaatccgcattaaaacactgagccttggcgtggtgatcccggatatcactttccatctggcaaaagagaatgcgcagatggcgctgtttagcccttatgacgtagagcgagtttatggcaagccgtttgccgatgtggccatcagccaacactatgacgaactggttgccgatgaacgcattcgcaaaaaatacctcaacgcccgtgatttcttccagcgactggcagaaatccagtttgagtccggctatccctacatcatgtatgaagacacggtaaaccgtgctaaccctatcgccgggcgcataaatatgagtaatctctgcagtgaaattttgcaggttaacagcgccagtgagtatgacgagaatctcgactatacccgcacaggccatgatatttcctgcaatttaggtagcttgaatattgcgcacaccatggattcccccgattttgcccgcacggtagagactgccgtgcgcggtttaacggcagtaagtgatatgagtcatatccgcagcgtgccgtccatcgaagccggaaatgccgccagccacgccatcggactggggcagatgaatttacacggctatctggcgcgagaaggcatcgcttatggtagcccggaagcactggatttcaccaatctctatttctatgccatcacctggcatgcactgcgtaccagcatgttgctggcacgcgaacgcggtgaaaccttcgccgggttcaaacagagtcgctatgccagtggtgaatattttagccaatatctgcaagggaactggcagccgaaaacggcgaaagttggcgaactgtttacccgtagcggtattacgttacctacccgtgagatgtgggcgcagctgcgcgacgacgtgatgcgctacggcatatacaaccagaatcttcaggcggtgccgccaaccggttctatctcttatatcaaccatgctacgagcagtattcatccgattgtggcgaaagtagagatacgcaaagagggcaaaacaggacgcgtttactaccctgccccgtttatgactaacgagaatctggcgctgtatcaggacgcttacgaaattggcgcagaaaagatcatcgacacctacgcggaagcgactcgccatgtcgatcaggggctgagcctgacgctttttttccccgataccgccaccactcgcgatatcaacaaagcgcagatttacgcctggcgcaagggtatcaaaacgctctattacatccgcctgcgtcagatggcgctggaaggcactgaaattgaaggctgcgtctcctgtgcactttaaggaatatctatgaaactcagtcgtatcagcgccatcaactggaacaagatatctgacgataaagatctggaggtgtggaatcgcctgaccagcaatttctggctaccagaaaaggtgccgctgagcaacgatattcctgcctggcagacattaactgtcgtagaacaacaactgacgatgcgcgtttttactggcctgacgctgctcgacacgctgcaaaatgttatcggcgcgccttctctgatgcccgatgcactcacgcctcatgaagaagcggtattaagcaatatcagctttatggaagcggttcatgcccgctcttacagtagcattttcagcacgctatgccagaccaaagatgtcgatgccgcctacgcctggagtgaagaaaacgcaccgttgcagcgaaaagctcagattattcagcaacattatcgcggtgatgatccgctgaaaaagaaaatcgccagtgtgtttcttgaatcttttttgttctattccggtttctggctgccgatgtatttttccagccgcggaaagctgaccaataccgcggacctgatccgtctgattatccgcgatgaagcagtccacggttactacataggctataaatatcagaaaaacatggaaaagatatctctgggacaacgtgaagagttgaagagtttcgccttcgatttgttgctggaactctacgacaacgagttgcaatacaccgatgagctgtacgccgaaaccccgtgggctgacgatgtgaaagcgtttctctgttacaacgccaataaggctttgatgaatctgggctacgaaccgttatttcccgcagaaatggcggaagtgaatccggcaatcctcgccgcgcttagcccgaatgccgatgaaaatcacgatttcttttccggtagtggctcctcttatgtgatggggaaagcggttgaaacagaagatgaagactggaatttctgagggtgttattttcaaaaatatcactacccgcagcagggaaataattcccgccaaatagctttttatcacgcaaataatttgtggtgatctacactgatactctgttgcattattcgcctgaaaccacaatattcaggcgttttttcgctatctttgacaaaaaatatcaactttctcgatttgctctcagcccttatatcacgggaaattccggcgatttgctcgcatcaatattcatgccacatttgccatcaggggttgcctcagattctcagtatgttagggtagaaaaaagtgactatttccattgggtaatatatcgacatagacaaataaaggaatctttctattgcatggcaattaaattagaaattaaaaatctttataaaatatttggcgagcatccacagcgagcgttcaaatatatcgaacaaggacttagtaaagaacaaattctggaaaaaactgggctaagccttggcgtaaaagacgccagtctggccattgaagaaggcgagatatttgtcatcatgggattatccggcagcggtaaatccacaatggtacgccttctcaatcgcctgattgaacccacccgcgggcaagtgctgattgatggtgtggatattgccaaaatatccgacgccgaactccgtgaggtgcgcagaaaaaagattgcgatggtcttccagtcctttgccttaatgccgcatatgaccgtgctggacaatactgcgttcggtatggaattggccggaattaatgccgaagaacgccgggaaaaagcccttgatgcactgcgtcaggtcgggctggaaaattatgcccacagctacccggatgaactctctggcgggatgcgtcaacgtgtgggattagcccgcgcgttagcgattaatccggatatattattaatggacgaagccttcagcgcgctcgatccattaattcgcaccgagatgcaggatgagctggtaaaattacaggcgaaacatcagcgcaccattgtctttatttcccacgatcttgatgaagccatgcgtattggcgaccgaattgccattatgcaaaatggtgaagtggtacaggtcggcacaccggatgaaattctcaataatccggcgaatgattatgtccgtaccttcttccgtggcgttgatattagtcaggtattcagtgcgaaagatattgcccgccggacaccgaatggcttaattcgtaaaacccctggcttcggcccacgtagcgcactgaaattattgcaggatgaagatcgcgaatatggctacgttatcgaacgcggtaataagtttgtcggcgcagtctccatcgatagccttaaaaccgcgttaacgcagcagcaaggtcttgatgcggcgctgattgatgcgccgttagcagtcgatgcacaaacgcctcttagcgagttgctctctcatgtcggacaggcaccctgtgcggtgcccgtggtcgacgaggaccaacagtatgtcggcatcattagcaaaggaatgctgctgcgcgctttagatcgtgagggggtaaataatggctgatcaaaataatccgtgggataccacgccagcggcggacagtgccgcgcaatccgcagacgcctggggtacaccgacgactgcaccgactgacggcggtggtgctgactggctgaccagtacgcctgcgccaaacgtcgagcattttaatattctcgatccgttccataaaacgctgatcccgctcgacagttgggtcactgaagggatcgactgggtcgttacccatttccgtcccgtcttccagggcgtgcgcgttccggttgattatatcctcaacggtttccagcaattgctgctgggtatgcccgcaccggtggcgattatcgttttcgctctcatcgcctggcagatttccggggtcggaatgggtgtggcgacgctggttagcctgattgccatcggcgcaatcggtgcctggagccaggcaatggtgactctggcgctggtgttaaccgccctgctgttctgtatcgtcatcggtttgccgttggggatatggctggcgagaagtccgcgagcggcgaaaattattcgtccactgcttgatgccatgcagaccacgccagcgtttgtttatctggtgccaatcgtcatgctatttggtatcggtaacgtgccgggcgtggtggtgacgatcatctttgctctgccgccgattatccgtctgaccattctggggattaaccaggttccggcggatctgattgaagccagccgcagtttcggtgccagcccgcgccagatgctgttcaaagttcagttaccgctggcgatgccgaccattatggcgggcgttaaccagacgctgatgctggccctttctatggtggtcatcgccagcatgattgccgtcggcgggttgggtcagatggtacttcgcggtatcggtcgtctggatatggggcttgccaccgttggcggcgtcgggattgtgatcctcgccattatcctcgatcgtctgacgcaggccgttgggcgcgacagtcgcagtcgcggcaaccgtcgctggtacaccactggccctgttggtctgctgacccgcccattcattaagtaactctgcacttgcccggtgacgccgggcattatcaccctgccaaaaaaaggaataacaatgcgacatagcgtactttttgcgacagcgtttgccacgcttatctctacacaaacttttgctgccgatctgccgggcaaaggcattactgttaatccagttcagagcaccatcactgaagaaaccttccagacgctgctggtcagtcgtgcgctggagaaattaggttataccgtcaacaaacccagcgaagtagattacaacgttggctacaccagccttgcttccggcgatgcaaccttcaccgccgtgaactggacgccactgcatgacaacatgtacgaagctgccggtggcgataagaaattttatcgtgaaggggtatttgttaacggcgcggcacagggttacctgatcgataagaaaaccgccgaccagtacaaaatcaccaacatcgcacaactgaaagatccgaagatcgccaaactgttcgataccaacggcgacggaaaagcggatttaaccggttgtaaccctggctggggctgcgaaggtgcgatcaaccaccagcttgccgcgtatgaactgaccaacaccgtgacgcataatcaggggaactacgcagcgatgatggccgacaccatcagtcgctacaaagagggcaaaccggtgttttattacacctggacgccgtactgggtgagtaacgaactgaagccgggcaaagatgtcgtctggttgcaggtgccgttctccgcactgccgggcgataaaaacgccgataccaaactgccgaatggtgcgaattatggcttcccggtcagcaccatgcatatcgttgccaacaaagcctgggccgagaaaaacccggcagcagcgaaactgtttgccattatgcagttgccagtggcagatattaacgcccagaacgccattatgcatgacggcaaagccagtgaaggcgatattcagggacacgttgatggttggatcaaagcccaccagcagcagttcgatggctgggtgaatgaggcgctggcagcgcagaagtaatttttattcgggcggataaggcgtttttgccgcatccgccgttctgtgcacaatgcctgatgcgacgctggcgcgtcttatcatgcctacaaaccacatcgcacatttcaacaatctatctttcatcccatattcatcaacatccgctattattgatttccagcttaatcatcacctgatgaacaaaaataatgactaaacctaatcatgagcttagcccggcgctgatcgtgctgatgtctatcgccaccggtctggcggtagccagtaactattacgcccagccattgctcgacaccatcgcgcgtaacttttccctttccgccagtagcgcaggctttattgttaccgccgcgcagttgggctatgccgcaggtctactgtttcttgttcccctcggtgatatgtttgaacgccgccgcctgattgtcagcatgaccttactggcggcatgttgattaccgccagcagtcagtcgctggcgatgatgatcctcggtacggcattaaccggtttattcagtgtcgtggcacaaattctggttccgctggcagcgacgctggctagtccggataaacgcggcaaagtggttggcactattatgagcggtctgctgttggggatcttgctggcacggacagttgccggattgctggcgaatctcggcggctggcgcaccgtcttttgggttgctagcgtgttaatggcactgatggcgctggcattatggcgtggtctgccacaaatgaaaagtgaaacccacctcaactacccacagttgttgggttccgttttcagtatgtttatcagcgataaaattctgcgtacccgcgcgttgctgggctgcctgacctttgccaatttcagcattctctggaccagtatggcctttttgcttgccgctccaccttttaactacagcgatggtgtcattggtctgtttggacttgcgggagctgccggagcgttgggcgctcgtccggcgggcggttttgccgataagggcaaaagccaccacaccacaactttcggtctgctgctgctattacttagttggctggcgatctggtttggtcacacttccgtactggcgttgattatcggaatcctggtgctggatctcaccgtgcagggcgtgcatatcactaaccagacggtaatttatcggatacatcctgatgcgcgcaatcgcctgaccgcaggttacatgactagctactttattggcggtgccgccggtagcctaattagtgccagtgcctggcaacatggcggttgggctggcgtttgtctggctggcgcgacgattgccctggttaacttactggtctggtggcgaggttttcatcgtcaggaagccgcaaattaagcaatcagcaaccgttttcgtggctttacacttataagggtgttaagaagcccatcagtctgataaggttaagatattcattcagtctatttataatattaacaatcgttaagcgtacactctatggaaagccctactccacagcctgctcctggtagcgcgaccttcatggaaggatgcaaagacagtttaccgattgttattagttatattccggtggcctttgcgttcggtctgaatgcgacccgtctgggattctctcctctcgaaagcgtttttttctcctgcatcatttatgcaggcgcgagccagttcgtcattaccgcgatgctggcagccgggagtagtttgtggattgctgcactgaccgtcatggcaatggatgttcgccatgtgttgtatggcccgagtctgcgtagccgtattattcagcgtctgcaaaaaagcaaaaccgccctgtgggcgtttggcctgacggatgaggtttttgccgccgcaaccgcaaaactggtacgcaataatcgccgctggagcgagaactggatgatcggcattgccttcagtagttggagtagctgggtatttggtacggtaataggggcattctccggcagcggcttgctgcaaggttatcccgccgttgaagctgcattaggttttatgcttccggcactctttatgagtttcctgctcgcctctttccagcgcaaacaatctctttgcgttaccgcagcgttagttggtgcccttgcaggcgtaacgctattttctattcccgtcgccattctggcaggcattgtctgtggctgcctcactgcgttaatccaggcattctggcaaggagcgcccgatgagctatgaggttctgctgcttgggttactagttggcgtggcgaattattgcttccgctatttgccgctgcgcctgcgtgtgggtaatgcccgcccaaccaaacgtggcgcggtaggtattttgctcgacaccattggcatcgccagcatatgcgctctgctggttgtctctaccgcaccagaagtgatgcacgatacacgccgtttcgtgcccacgctggtcggcttcgcggtactgggtgccagtttctataaaacacgcagcattatcatcccaacactgcttagtgcgctggcctatgggctcgcctggaaagtgatggcgattatataacccacaagaatcatttttctaaaacaatacatttactttatttgtcactgtcgttactatatcggctgaaattaatgaggtcatacccaaatggatagtagctttacgcccattgaacaaatgctaaaatttcgcgccagccgccacgaagattttccttatcaggagatccttctgactcgtctttgcatgcacatgcaaagcaagctgctggagaaccgcaataaaatgctgaaggctcaggggattaacgagacgttgtttatggcgttgattacgctggagtctcaggaaaaccacagtattcagccttctgaattaagttgtgctcttggaagttcccgtaccaacgcgacgcgtattgccgatgaactggaaaaacgcggttggatcgaacgtcgtgaaagcgataacgatcgccgctgcctgcatctgcaattaacggaaaaaggtcacgagtttttgcgcgaggttttaccaccgcagcataactgcctgcatcaactctggtccgcgctcagcacaacagaaaaagatcagctcgagcaaatcacccgcaaattgctctcccgtctcgaccagatggaacaagacggtgtggttctcgaagcgatgagctaacgcgtcatctcgctcaaaaatccagatttataaaagaaaaaatgactggccagcatcgcaacatgctggcctttttggcaagcaggtcggctcagccgatgagttaagaagatcgtggagaacaatatgagcgcaaatgcggagactcaaaccccgcagcaaccggtaaagaagagcggcaaacgtaagcgtctgctcctccttctcaccttgctctttataattattgccgtagcgatagggatttattggtttttggtactgcgtcacttcgaagaaaccgatgacgcatacgtggcagggaatcaaattcaaattatgtctcaggtgtctggcagcgtgacgaaagtctgggccgataacaccgattttgtaaaagaaggcgacgtgctggtcactctcgacccgacagatgctcgccaggcgtttgaaaaagccaaaactgcactggcttccagcgttcgccaaacccaccagctgatgattaacagcaagcagttgcaggcgaatattgaggtgcagaaaatcgccctcgcgaaagcacaaagcgactacaaccgccgtgtgccgctgggcaatgccaacctgattggtcgcgaagagctgcaacacgcccgcgacgccgtcaccagtgcccaggcgcaactggacgtcgcgattcaacaatacaatgccaatcaggcgatgattctggggactaaactggaagatcagccagccgtgcaacaggctgccaccgaagtacgtaacgcctggctggcgctggagcgtactcgtattatcagtccgatgaccggttatgtctcccgccgcgcggtacagcctggggcgcaaattagcccaacgacgccgctgatggcggtcgttccagccaccaatatgtgggtggatgccaactttaaagagacgcagattgccaatatgcgtatcggtcagccggtcactatcaccacggatatttacggcgatgatgtgaaatacaccggtaaagtggttggtctggatatgggcacaggtagcgcgttcagtctgcttccagcgcaaaatgcgaccggtaactggatcaaagtcgttcagcgtctgcctgtgcgtatcgaactggaccagaaacagctggagcaatatccgctgcgtatcggtttgtccacgctggtgagcgtcaataccactaaccgtgacggtcaggtactggcaaataaagtacgttccactccggtagcggtaagcaccgcgcgtgaaatcagcctggcacctgtcaataaactgatcgacgatatcgtaaaagctaacgctggctaatccagaggtgcgtgtgatgcaacagcaaaaaccgctggaaggcgcgcaactggtcattatgacgattgcgctgagtctggcgacattcatgcaggtgctggactccaccattgctaacgtggcgatccccactatcgccgggaatctgggcagtagcctcagccagggaacgtgggtaatcacttctttcggggtggcgaatgccatcagcatcccgcttaccggctggctggcaaagcgcgtcggggaagtgaaactgttcctttggtccaccatcgcctttgctattgcgagctgggcgtgtggtgtctccagcagcctgaatatgctgatcttcttccgcgtgattcaggggattgtcgccgggccgttgatcccgcttagccaaagtctattgctgaataactacccgccagccaaacgcagcatcgcgctggcgttgtggagcatgacggtgattgtcgcgccaatttgcggcccgatcctcggcggttatatcagcgataattaccactggggctggatattcttcatcaacgtgccgattggcgtggcggtggtgttgatgacactgcaaactctgcgcggacgtgaaacccgcaccgaacggcggcggattgatgccgtggggctggcactgctggttattggtatcggcagcctgcagattatgctcgaccgcggtaaagagctggactggtttagtagtcaggaaattatcatccttaccgtggtggcggtggtggctatctgcttcctgattgtctgggagctgaccgacgataacccgatagtcgatctgagcttgtttaagagccgcaacttcaccatcggctgcttgtgtatcagcctcgcgtatatgctctacttcggcgctattgttctgctgccgcagttgttgcaggaggtctacggttacacggcgacctgggcaggtttggcctctgcgccggtagggattattccggtgatcctgagcccgattatcggccgcttcgcgcataaactggatatgcggcggctggtaaccttcagctttattatgtatgccgtctgcttctactggcgtgcctatacctttgaaccaggtatggattttggcgcgagcgcctggccgcagtttatccaggggtttgcggtggcctgcttctttatgccgctgaccaccattacgctgtctggtttgccaccggaacgactggcggcggcaagcagcctctctaactttacgcgaacgctggcggggtctatcggcacgagcataaccacgaccatgtggaccaaccgcgagagcatgcaccatgcgcagttgactgagagcgtaaacccgttcaacccgaatgcccaggcgatgtacagtcaactggaagggcttgggatgacgcaacagcaggcaagtggctggattgcccagcagatcaccaatcaggggctgattatttccgccaatgagatcttctggatgagtgccgggatattcctcgtcctgctggggctggtgtggtttgctaaaccgccatttggcgcaggtggcggcggaggcggtgcgcactaagtacaactaagccagttcatttgaactggcttttttcaattaattgtgaagatagtttactgattagatgtgcagttcctgcaacttctctttcggcagtgccagttcttcgttgctgttgatgcgtacgtcacgttccagaatgctacgcgcaatatcctgcgcttcctgcaagctgtgcatctggtaagtgccacactggtagacgttcagttccgggatctgattctgatcctgcactttcagcacgtcttccattgccgttttccaggcatcagcaacacgctgctcatctggcgtaccaatcagactcatataaaaaccggtgcggcagcccattgggctgatatcgataatctctacaccattaccgttaagatggttacgcataaaaccagcaaacaggtgctccagggtatggatccctctttctggcatcacttctttgttcggcacgcagaagcgcagatcgaacacggtgattgcgtcgccatgcggggtgttcattgttttcgccacccgaactgcaggcgcttccatccgggtatgatcgactgtgaagctatctaacaacggcatttagccacctccggtaatttttttaaaaattttctgaactctttcttcccaggcgagtctgagtatatgaaagacgcgcatttgttatcatcatccctgaattcagagatgaaattttggccactcacgagtggcctttttcttttctgtcaggcgtgtttttccagccacaccgcaaacggttcggtatcagcggcttccatttcctgctgacggcgttcagacgcctcgcgctcggctacaaaatcctcttcgcgcagaatttccagcggctcttcacgcagcagattacggtaggcttctgcaaatgctttgcctgttccgccaataccagtatcaatcatagaccttaagatacgggcagagaaagtcagatcgggattatcgaagcaggcaaccagttcatcacacactttctgatacgcttcgccgccgttaatactatccagcgtttgcgcgacgcgtttcagatcgcggaacagatctttacccacctgcggtaacgggaactgtgcggtttcgcagccgatacccagcgtcagacccggtttgcgaccttcgaggatcacccggttccagttaacgcgtgtacaggcaagttcgctactgctcatttccggtgcatcagccagcgcacaccagaccataaacaggtcgaggaatcgcacctgctgttcatctacaccaatcgggctgaacgggttgatgtccaggctacgcacttcaatatattcaatgccgccacgtaacagcgcatcagaagggctctcgccgctgcgggtaacgcgttttggacgaatcggcgcgtacagttcgttttcaatctgcaacacgttgctgttgatttgcagcctcttaccgtctttctcaataccaatcttcgcgtactcttcgcttggcgttttgattgcctgtttaaggcccgctacgtactcgtaaagatcgttgaaggtaataccaagattgctttggcttttattggtatagccgagatcgctcaaacgaagagaggtcgcatacggcaggtaatacataccgcactcggttttctcaaacggcaggctcgttggttttccttgcaggaaagaagaacaaatcgccggagatgcaccaaacagataaggaatgacccaaccgaaacgatagtaattgcggataacgcggaaatagcccgcagaaattttctctttggcatcagcgccgctgatatcaccgcacttcgcttgccagaatgccattggcaaagagaaattgtagtgcacgccggaaatggtttgcatcagcgcgccgtagcgatttttcagcccttcacgatacagcgttttaaagcgtccggtgttagaagtgccgtactgtgccagttcgatgtcctgaccttctgcgatgtagcatggcatacttaacggccacatccgctcatcgcccatattgcgcgccgtataacgatgcagatcgcgcataaaggtcagcatatgttcaatatcaccatccactggtgtaatgaattccagcaatgcttccgcaaaatcggtagtaatccatttgtgcgtcagtgcggaacctaatgcttcaggatgacctgttgttgccagtgtgccatcagcattaacacgcaaagtttcgcgctccagcccacgctgtatcccctttaacgcctgaggatgtttttccagccaggccagcgcctgacttacgtccgggatcaaattgacctcccgcctgtcaaaatcgttttaattagcataactgtaatggtgaccatatgtgcaggcctacaattagtgccaccacatcatgccctgaacggtcgctgctgcaactgcaacatagcgtaacgctttaccaaggcacaaaaaaaagattaccggtccccagctgatgcgcatccatcccgctaacagacacagtaaatcgccaaccacgggcatccagcttaataatagcgtgactgcaccatagcgtttcagccagccggtagctttctcttgccagcggcttgttttacgcaatggaaagaaacgcccaaggataacgttagttaaccctccaaggctattacccattgttgctgttaaaactaaaacccagggatgactgatcccggaaagcaacattgccaccagcacgacttcggagttgccgggtaatagtgtagcgctgagaaaactactggcaaacaagctgaaaaggcttaacgcttcactcacagcaagcgaacatccacggcgtccatgcctgctgcacgggccgcctgaataccgaaatcggcatcttcaaagaccacacactgcgtcggttgcacgcccatacgctgcgcgcacaacaaaaatgtgtctggcgcgggtttatggtgtttgacgtgatcggcagcgacgacggcgtcaaaataatggcgtaatcccaggtgcgccagcaatgcctcagcgatggcgctttcactccccgttcctacagccattgggcgacgaccatgccaacttttcaccacatcaacaagaggaagcggttcgacgctatccagcagcatacttcttactgcttctgttttttcacgcgctaacgcatgcgggtcgagatcggcctgattcagctcaataattgcctgagcaatacgccaggtggggcttccattaagcgcaatcatcgcctgaatatcgtactgaagaccgtagtgccctaatacttcgcgccacgctttacggtgcgtaggctccgtatccaggattgtgccatccatatcaaaaattaaacctgcataacgctcgtacatggtcttctcgcaagtcgaaaaatatgacgctactttagcgtaattgcttgattttgtcgctgatggcgaaggagaagaaaattcaggaaatggataaaggagttatttagaaatgagatatttttgaaggaaattttttggagaagatggtgcatccgggaggatgactcactgacgttcgcccttcgggccgttgctggcgcaacgttatccttcctggtgcctgcggttaataccgctatctcttcgataccttcattgctgaaggttacggagaatatggtgcatccgggaggattcgaacctccgaccgctcggttcgtagccgagtactctatccagctgagctacggatgcatcgggaaaacttattctactgctgatattgataccgctactaaagccatatcaattaagagatggtgcatccgggaggattactcgccttgcggctcgcccttcgggccgttgctaaagcaacgttatcatccctagtgcctgcggttaattccgctacctcttcgataccttcattgctgaagatttcggagaatatggtgcatccgggaggattcgaacctccgaccgctcggttcgtagccgagtactctatccagctgagctacggatgcatcgggaaatttattttactgctgatattgataccgctactaaagccatatcaagtaagagatggtgcatccgggaggattcgaacctccgaccgctcggttcgtagccgagtactctatccagctgagctacggatgcatcgggaaacttactttactgcagattttttgataccgctactaaagccgtatcaagtaagagatggtgcatccgggaggattactcgccttgcggctcgcccttcgggccgttgctaaagcaacgttatcctccctggtgcctgcggttattaccgccacctcttccataccttcatcgctgaaagtacgtagaatatggtgcatccgggaggattcgaacctccgaccgctcggttcgtagccgagtactctatccagctgagctacggatgcaaatggcggtgaggcggggattcgaaccccggatgcagcttttgaccgcatactcccttagcaggggagcgccttcagcctctcggccacctcaccacacgcctcttacgagtgcttcgaagaacttgtttatcgctcatcgtcgctgcgtggcgcacatattactttctgagacttataagtcaaacaatttttcctacacttttatcgtttgcacacttcacgttcaattagtctgtaaaaacgtcaaaaagagtgttttatcaacagaagaatggaggtctgacagatagtagtaatgcaaaaaaatggagacttaagttgaatgaacgggagtaaagcgaaaagactatagagtgaaggagaaattttgagggtgcgtctcaccgataaagatgagacgcggaaagattagtaactggactgctgggatttttcagcctggatacgctggtagatctcttcacggtgaacagaaacttccttcggggcatttacgccaatacgtacctggttgccctttacccctaaaactgtcacggtgacctcatccccaatcatgagggtctcaccaactcgacgagtcagaatcagcattctttgctccttgaaagattaaaagagtcgggtctctctgtatcccggcattatccatcatataacgccaaaaagtaagcaatgacaaacacattacatctaagcagtcatggcattacattctgttaaacctaagtttagccgatatacacaacttcaacctgactttatcgttgtcgatagcgttaatgcgaatgccgtgaagcgagtccacggcattgcctgacgcttatattattgcaatttcgcgctgacccagcctttcacactggctaacgctgcaggtaaggccgcagcatccgtaccaccggcttgcgccatgtcaggacgtccaccacccttgccgcccacctgctgagcgaccataccaatcagttcccctgctttcacacgatctgtgacgtccttagatacgcctgcaatcagagaaaccttaccttcgactaccgttgccagcacgataattgtgctccccagctgattttttaaatcgtcaaccatggtacgcaacattttcggctcaacaccgctaagctcgctaaccaacagcttaacaccattaacatcaattgccttactggaaagatttgcgctctcctgtgcggcagcttgttctttaagctgttgtaactctttttccagctgacgcgtacgttccagtacactgcgcactttatcagccagattattgctatcgcctttcagcagatgcgcgacttcgcttaagcgatcgctgtctgcatgaacggtggcgatagcaccttctccggttaccgcttcgatacgacgaacgcctgcagcagtaccgctttcagagatgatgcggaacagaccaatatcaccagtgcggctggcgtgagtaccgccacacaactcggtagagaaatcgcccatgctcagcacgcgtacgcgctcatcatacttctcgccgaacagcgccatcgcacctttcgctttcgccgcttcgagatccatgatgttggtttcgatcggcaaattgcgacgaatctgtgtgttcaccaggtcttcgaccgcacgaatctcttctggtttcatcgcttcgttgtgactgaagtcgaagcgcagcaccttgtcgttaaccagactacctttctggcttacatgagtacccagaacctggcgcagcgcagcgtgcatcaggtgcgttgcggagtgattcagacgaatacgggcgcgacgagcctcatcaacatcagcctgcaccgcgtcgcccactttcagagaacccgcagcaagtttaccgatgtgaccaatcgcctggccgtatttctgcgtatcttccaccgcaaaggagaagttagcgcctttcagttcgcctttatcgccaacctgaccgccggattccgcatagaatggcgtttgatccagcacgaccacagcttcctggcctgcattgatggcatcaaccgctttaccatcaacaaacagcgcagtcactttgccgttcagttccagatggtcatagcctttaaattcagatgcactgtcaacacggatcattgcgttgtaatcggcaccaaagccgctggcttcgcgcgcgcgacgacgctgctcttccattgcagcttcaaaaccagcttcgtcaactttgatgttgcgctcacgacaaacatcagccgtcaggtcaaccgggaagccataggtgtcgtacagacggaaagcagtttcaccatccagcgtatcaccagaaagttttgccagctcttcatccagcaacgccagaccgcgctccagagtacgagcaaactgctcttcttcagtcttcagcacctgctcaacctgcgcctgctggcgtttcaggtcttcacccgcagagcccataacgtcgatcagcggaccaaccagtttgtagaagaaggtttctttcgcgccgagcatattaccgtgacgcactgcgcgacgaatgatacgacgcagtacataaccacggttttcattggacggcattacgccatccgcgatcaggaacgcacaagaacgaatgtggtcagcgattacgcgcaggcttttattgctcagatcggttgcgccagtgactttcgctaccgcctggatcagcgtgcggaacaggtcgatgtcatagttagagttaacgtgttgcagcaccgcagcaatacgctccagacccataccggtatctacagacggcttcggcagcggttccatcgtgccatcggcctggcggttgaactgcatgaagacgatgttccagatctcaatgtagcggtcgccgtcttcttccgggcttcccggagggcccccccaaatgtggtcgccgtgatcgtagaagatttcggtgcacgggccgcacggaccagtgtcacccatctgccagaagttgtcagatgcgtatggcgcacctttgttatcgccgatgcgaataatacgttcgcgcgggatccctacttctttttcccagatttcgtaggcttcgtcgtcgctttcatagacggtaacccacagacgctctttcggcagggcaaaccatttttcgctggtcagcagttcccatgcaaactgaatggcatcgtgtttgaaatagtcgccgaagctgaagttgcccagcatttcgaagaaggtatggtgacgcgcggtgtaaccgacgttttccaggtcgttgtgtttaccacccgcacgcacgcagcgttgggaagtggtagcgcgggaataattacgcttgtcgagcccaaggaacacatccttgaactggttcatcccggcgttggtaaacaacaaagttgggtcgttatggggtaccagggagctgctggcaactacctgatgtcccttactatggaaaaagtcgagaaacgcctgacggatctcagcggtgctcttgctcataattatcctgaaatcaagctaacgaaatatcgccaccagctccagcgtgtcttaaccgccgggctggtaactgaaaagtgggaataagataagttttcttgactgggaagtaaaataccgtatgcgttcagtcggcaaaatttcgccaaatctcctggatatcttccatcagatagccacgatagagcagaaaacgctggatcttaactttttcactaaagacagttggcaaaggttcgccatattttcgcgtcgcctgatcgcgcgccagtgcgcaccagtcgatgtcacattcacgcatcgctttttctgtcgcttcgcgggaaatacctttctgattcagttcctggcgaatacgcgcaggtccataacctttgcggctacggctggcgataaagcgcgcaacaaatcggctgtcatcgagatagccatgttcatggcaccaggcaataacgcgctcgtaatcttctgccgtagcatcaatctcttctgggccatttttgcccataatcggtgccgcgagtttacgtcgcagttcttgctcactgtgatcgcgcaccgccagaatgcgtaccgcacgatccaacaggcgagcatatgccgggcgacgggatgtactttctgtcatggcatatccttacaacttaaaaaagcaaaagggccgcagatgcgacccttgtgtatcaaacaagacgattaaaaatcttcgttagtttctgctacgccttcgctatcatctacagagaaatccggcgtactgttcgggttgctcagcagcaactcacgtactttcttctcgatctctttcgcggtttccgggttatctttcagccaggcagtcgcattcgctttaccctgaccgatcttctcacctttgtagctgtaccacgcgcctgctttctcgatcagcttctcttttacgcccaggtcaaccagttcgccgtagaagttgataccttcgccgtagaggatctggaattcagcctgtttaaacggcgcagcgattttgttcttcaccactttcacgcgggtttcgctacccaccacgttttcgccctctttcaccgcgccgatacgacggatgtcgagacgaacagaggcgtagaatttcagcgcgttaccaccggtagtggtttccgggttaccgaacatcacaccaattttcatacggatctggttgatgaagatcagcagcgtgttggactgcttcaggttacccgccagcttacgcatcgcctggctcatcatacgtgccgcaaggcccatgtgagagtcgccgatttcgccttcgatttccgctttcggcgtcagtgccgccacggagtcaacgacgataacgtctactgcgccagaacgcgccagggcgtcacagatttccagtgcctgctcgccggtgtccggctgggagcacagcaggttgtcgatatcgacgcccagtttacgtgcgtagattgggtccagcgcgtgttcagcatcgataaacgcacaggttttaccttcacgctgcgctgcggcgatcacctgcagcgtcagcgtggttttaccggaagattccggtccgtagatttcgacgatacggcccatcggcagaccacctgccccaagcgcgatatccagactaaggctaccggtagagatggtttccacatccatggaacggtcttcacccaggcgcatgatggagcctttaccaaattgtttctcaatctggcccagtgctgccgccaacgctttctgtttgttttcgtcgatagccatttttactcctgtcatgccgggtaataccggatagtcaatatgttctgttgaagcaattatactgtatgctcatacagtatcaagtgttttgtagaaattgttgccacaaggtctgcaatgcatacgcagtagcctgacgacgcaccgcatcacggtcgccgctgaagcattcccgccgggtaatgccttcaccgcgggcagtggcaaaagcaaaccagacggtgccgacaggcttctcttcactgccgccatccggcccggcgataccactaatagacacggcataatcagcacgagccgctttcagtgcgcctatcgccatttccaccacgacgggttcactcaccgcgccatgctgcgccagcgtctcttcgcgtacgccgatcatctgcgctttggcttcgttactgtaggtgacaaatccgcgttcaaaccaggcggagctaccggcaatatcggtaatcactttcgctacccaaccaccggtacaagactcggcagttgttacggttgcgccacgggctttcagcgcctgcccaacctgttcacttaactgcatcagttcactgtcagtcatcacaacctctgtcagtcaaaaatttatgccggacaagatagcactttcgtcaggaagatggtgttggcgttgcaattttacgaggaggattcagaaaaaagctgattagccagagggaagctcacgcccccctcttgtaaatagttactgtactcgcgccagcgccacggcttgtcctaactgccagaccgccattgcgtaatgggtgctgtggttgtaacgggtgatggtgtagaagttcggcagaccgtaccagtactggtagccggtgccaacatccagacgcagcaggctggcttgttgatggttgcccagcggctgctgtggcgttaaacctgcggcggcaagctggctaatgctgtacttagttttgaagccatttggcaagcctggagcctgaccgtttgccattaccgcgacctgatcgcctttcacccagccgtgcgctttgaaatagttcgccacgctaccgatcgcatcaaccggatcccacaggttgatatgcccgtcgccgctgaaatctaccgcatattgtttgtaagagctcggcataaactgtccgtagcccatcgccccggcaaaggaacctttcagattgagcggatcgtcctgctcgtcgcgcgccatcaacaggaaggtttccagctcgccagagaaatactccgcgcggcgtgggtagttaaaactcagcgttgccagcgcatcgaggatgcgagttttccccatcacgcgcccccagcgggtttcaacgccgataatcccgacgataatttccggcggtactccatacacctgccacgcgcgattcaacgcatcttcatactgattccagaaaaccacaccgttctgcacgttgtccggcgtaataaattttttgcgataacggagccatgcgccgttcggaccacttggcggtttcacgcttgtggttggtgcctggttatccatcagccgcagtacgctatccagacgcttcgcctgggagagaatttcctgcaactgctgacgatcgaaaccgtgtttgttcaccattttgtcgatgaactgctgggcattcgggttattagcgaaatcgccgcccatctgcatcacattgtgctgcggctcaagcaggaagccgccagacggcgttccggtggtcgtatcagtctcagtaggttttggcttgctgctacaggcggcaagcaacacaaaaaggggaagcaatgttacataacgacgcttgaacatgaggggtccatttaacagattcaaccaggggcaagtatggtaaagcatcacgccccgcacaaggaagcggtagtcactgcccgatacggactttacataactcaactcattcccctcgctatccttttattcaaactttcaaattaaaatatttatctttcattttgcgatcaaaataacacttttaaatctttcaatctgattagattaggttgccgtttggtaataaaacaataaatcctgaaggagagaacaatgatagaaaccattactcatggtgcagagtggtttatcgggctgttccaaaagggcggagaggtgtttaccgggatggtgaccggcattcttccgctgttgattagcctgctggttatcatgaacgcactgattaattttatcggtcagcatcgtattgaacgttttgctcaacgttgcgccggtaaccctgtttcccgttacctactgttaccgtgcattggcacgtttgtcttttgcaatccgatgaccctaagcctgggtcgctttatgccggaaaagtacaaacccagctactacgcggcggcctcttatagctgccacagtatgaatggcctcttcccccatatcaaccctggcgaactgtttgtttatcttggcattgccagcggtctgacaacgctgaacctgccacttggcccactggcggtgagttatctgctggttggtctggtcaccaatttcttccgcggctgggtgaccgatctgaccaccgccatttttgagaaaaagatgggcattcaacttgaacaaaaagttcacctggcaggagcaacaagttgaaataacacctggcaggagcaacatcatgacgcatattcggatcgaaaaaggaacgggtggctggggcggcccgcttgagctgaaagccacgccgggaaaaaaaatcgtctatatcaccgccggtacccggcctgcgattgttgacaaactggcacagcttactggctggcaggctattgacggatttaaagaaggtgaacccgcggaggcggaaattggtgtcgcggtaatcgactgtggcggcacattacgctgcggcatctatccgaaacgacgtattcccaccattaatatccacagcacgggcaagtccggtccgctggcgcagtacattgtggaagatatttatgtctctggcgtaaaagaagaaaacatcactgtagtaggtgatgcgacaccacaaccctcttccgtgggccgtgactatgacaccagtaagaaaatcaccgaacaaagcgatggtttactggcgaaggtgggaatgggcatggggtccaccgttgcggtgctgtttcaatctggtcgtgacaccatcgacactgtattaaaaaccattctgccgtttatggcattcgtcagcgcgctcattggcatcattatggcttctggccttggtgactggattgcccacggtcttgctccgctggcgagccatccactgggtctggtcatgctggcgctcatctgttccttcccactgcttagtcctttcctcggcccaggcgcagttatcgcacaggttatcggcgtattgattggcgtgcagattggtctcggcaatattccgccgcatctggctttaccggcactgtttgccatcaacgcgcaggcggcctgcgacttcatcccggtcggtttgagcctggcggaagcccgtcaggacacggttcgcgtcggtgtcccttctgtactggtgagccgctttttaaccggcgcgccgactgtactgatcgcctggtttgtctccggttttatctatcaataaaggctgaaacatgaccgttatttatcagaccaccatcacccgtatcggcgcgagtgccattgacgccctcagtgaccagatgctcatcacctttcgtgaaggcgcgcctgcggacctcgaagagtattgcttcattcattgccacggcgagttgaaaggtgcactccatcccggtttgcaatttagtctcgggcagcatcgctatccggtgaccgctgttggcagcgtggcggaagacaaccttcgcgaactgggtcatgtcaccctgcgcttcgatggtttaaacgaagcggaatttccgggcactgtccatgtggcaggccctgtccccgacgatatcgcgccgggaagcgttttgaagtttgaatctgttaaggagtaaaaaatgaatcaggttgccgttgtcatcggtggtgggcaaaccttaggcgcgttcctgtgccacggtctggctgccgaggggtatcgcgtcgcggttgtcgatattcagagcgacaaagccgcaaatgtggcacaagaaattaacgccgaatatggtgaaagtatggcgtacggttttggtgctgacgccactagcgagcaaagcgttctggcgctctctcgtggggtagatgaaatctttggtcgcgtggatttgctggtctacagcgccggaatagcaaaagcagcctttatcagcgacttccagctcggcgattttgaccgtagcctacaggtgaatctggtgggttatttcctgtgtgcgcgtgaatttagccgtttgatgatccgcgacgggattcaggggcgcattattcagatcaacagcaaatccggcaaagtgggcagcaaacacaactctggctacagcgcagcgaaatttggtggcgtcgggctgactcaaagtctggcgctggatctggcggagtacggcattacggtgcatagtctgatgctcggtaacctgctgaaaagcccgatgttccagagtctgttgccacaatacgcgaccaagctgggtatcaaaccggatcaagtcgagcagtattacatcgacaaagtaccgctcaaacgcggctgcgattatcaagatgtgctgaatatgctgctgttctacgccagtcctaaggcgagctactgcaccggacagagcatcaatgtcaccggcggtcaggtgatgttctgatcaacagcggagatccattaaggatctccgtgagactatagaatgcctgatgcgctacgctcatcaggcatacaggacttccgccactacattaaggaaaagttatggtatccgcactcatcaccgtcgccgttatcgcctggtgtgcgcaactggccttaggcggctggcaaatttctcgttttaaccgtgccttcgacacactatgccagcaagggcgggttggcgtgggccgttccagcgggcgctttaaaccgcgggtcgtggtcgccatcgcgctggacgatcagcagcgcatcgtcgacaccttgtttatgaaaggactgaccgtcttcgcccgaccgcaaaaaattcccgcaattaccggtatgcatgcgggtgatttacagcccgatgtgatctttccccatgatccactaagtcagaatgctctaagtttggcgcttaaactgaaacgtggataatttcgttgtgaatgttacttgcttgcgaagttatcattttgaaacctaaatcaggtaatcacgcccatgaaacctcgtcagcgtcaggccgccattctggagtatctgcaaaagcagggtaaatgcagcgttgaagaattggcgcaatactttgacaccacaggcacaaccattcgcaaagatctggtcattctggaacatgccggaaccgtcattcgtacttatggcggagtggtgttgaataaagaggaatccgatccgcctatcgatcataaaacactcatcaacacccacaagaaagagctgattgcagaagctgccgttagttttatccatgatggcgatagcatcattcttgatgctggcagtaccgttttgcagatggttcccctgctcagccgctttaataacatcacggtgatgaccaacagcctgcatatcgtcaatgcgctatccgaactggataacgaacaaactatcctgatgccaggcggaacgtttcgcaaaaaaagcgccagttttcacgggcaactggcagagaatgccttcgagcatttcaccttcgataaattgtttatgggcaccgacggcatcgatctcaatgcgggcgtaaccacctttaacgaggtttataccgtcagtaaggcaatgtgcaatgccgcgcgcgaagtgattttgatggcggacagtagtaagtttggccgtaaaagccccaacgtagtttgcagtcttgaaagcgtcgataagctgattaccgacgcaggtatcgatccggcgtttcgtcaggcgctggaagagaaagggatcgatgtgatcataaccggagagagcaatgagtgaagcactactgaacgcgggacgtcagacgttaatgctggagttgcaggaagcaagccgtttaccggaacgtctgggcgatgattttgttcgcgccgccaatatcatcctgcactgtgaaggcaaagtggtggttagcggaattggcaaaagcggccacattggtaagaaaatcgccgcaacgcttgccagtaccggcactccggctttttttgtccatccggcagaagcgctgcacggcgatctggggatgatcgaaagccgcgatgtgatgctgtttatctcttactccggtggcgcgaaggaactggatctgattattccgcgtctggaagataaatctatcgcgctgctggcgatgaccggcaaaccgacgagtccgctgggcctggcggcaaaagcggtgctggatatctccgtagaacgcgaagcctgcccgatgcaccttgcgccgacctccagcaccgtcaataccctgatgatgggtgacgcgctggcgatggcggtcatgcaggcgcgcggatttaatgaagaagattttgcccgctcccacccagccggggcactgggcgctcgcttgctgaataaagtgcatcatctgatgcgccgtgacgatgccatcccacaggtggcgttaaccgccagcgtgatggatgcgatgctggaactcagccgcaccggtctggggctggtggcggtatgtgacgctcaacaacaggtacaaggcgtctttaccgacggcgatttacgtcgctggctggttggcggcggcgcactcaccacgccagtcaatgaagcgatgacggtcggcggcaccacgttgcaaagccaaagtcgcgccatcgacgccaaagagatcctgatgaagcgcaaaatcactgccgcaccggtggtggatgaaaacggcaaactcaccggcgcaataaacctgcaggatttctatcaggccgggattatttaatccttcaatcccagacgtttcgccagccgatgcaggttggcgacgtcggtttccagcatccgcgcgcaggcagcccagttgtgatgattttgtgccagtgcctgacgaatagtttcacgctggaacgcttctgtcgcttcacgcaggttttgcttaacaacgggcaccgccgccacttctggcgtcggcaacgtcacctcaggaaaagcaaaatgttgcgcctcaagaatcacttcatcgccgctgcgggtggctctcgccagaactaccgcccgatgaatagcatgttccagttcgcgcacgtttcccggaaaactgtagtgttgcagtaaatttcgcgctccggcacttaataccacgcgggagagcccctgccgcaaacgacactgctcgcagaaataccccgccagcagaatgacatcatcgccccgctcacgcagcggcggcacgctaagtggaaacacgctcaggcgatgaaacaaatcggcgcggaatcgccctgccagcacctcttcgcgtaaatcgcggttagtcgccgccagcacgcgcacatcgacccgcaaacaacggtcatcgccaacgcgctgaatatcgccatactgcaacaccctcagcagcttggcctgcaatgccaagctcaactcgccgatctcatccagaaacagcgtgccgttatccgccatttcaaacttcccgctgcgattactgatagcgccagtaaacgctcctttcacatgcccgaacaactcactttccgccacactttccggcagtgcagcacagttgagatagaccagcggattcaccgcccgtgggctggcttcatgaatcgctttcgccaccagctccttaccggttccagtctcaccgctgatcaggacgttgagatcggacgccgccacaatctcaatctcttttttcagttgcgtcatgccaggggacaagccaatcatctgcgtctgtttcaccgcttcaaacggcgtggcatcgcctggcagcatattctggctttccagttgttcaatcagcaacgcattgcttaacgctcccgccgccagcgcagcaatcagccgtagctcttcgtcgctgaaaacatcgaactgatcgggctgcatcccgtcgagcgtcagtgcgccgatcaggttttgcccggcaaacaatggcagaccaacgcaggcgtgaaccttcagactctcctgcccaggaatcaaaccgtcatagggatcgggcaattcgctgtctgcgggaaagcgcaccacatccccggcgcgggcaatcgcttccagccgtggatgcccttccagcgcaaagcgtctaccgagtacatcctttgccagaccgtcgatggcaagcggaataaactgccggctatcgtaacgtagcaacgcagacgcatcgcactccagcacctgacgtagcgtggtgatcaggcgctgaaaacgatcctggtgaccaatcccacgctgcaattcgatggcgatattcgccagcacatcaacggaaaaactcatctttgcctcactgtcaatttgactatagatattgtcatatcgaccatttgattgatagtcattttgactactcattaatgggcataattttatttatagagtaaaaacaatcagataaaaaactggcacgcaatctgcaattagcaagacatctttttagaacacgctgaataaattgaggttgctatgtctattgtggtgaaaaataacattcattgggttggtcaacgtgactgggaagtgcgtgattttcacggcacggaatataaaacgctgcgcggcagcagctacaatagctacctcatccgcgaagaaaaaaacgtgctgatcgacaccgtcgaccataaattcagccgcgaatttgtgcagaacctgcgtaatgaaatcgatctggcggatatcgattacatcgtgattaaccatgcagaagaggaccacgctggggcgctgaccgaactgatggcacaaattcccgatacgccgatctactgtacagccaacgctatcgacagcataaatggtcatcaccatcatccggagtggaattttaatgtggtgaaaactggcgacacgctggatatcggcaacggcaaacagctcatttttgtcgaaacaccaatgctgcactggccggacagcatgatgacttacctgacaggcgacgcggtgctgttcagtaacgatgctttcggtcaacactactgcgacgagcatctgttcaacgatgaagtggatcagacggagcttttcgagcagtgccagcgttactacgccaatatcctgacgccgttcagccgcctggtaacaccgaaaattaccgagatcctgggctttaacttaccagtcgatatgatagccacttcccacggcgtggtatggcgcgataacccgacgcaaattgtcgagctgtacctgaaatgggcggctgattatcaggaagacagaatcaccattttctacgacaccatgagcaataacacccgcatgatggctgacgctatcgcccaggggattgcggaaaccgacccacgcgtggcggtgaaaattttcaacgtcgcccgaagcgataaaaacgaaatcctgactaatgtcttccgcagtaaaggcgtgctggtcggcactagcacgatgaataacgtgatgatgccgaaaatcgccgggctggtggaggagatgactggtttacgcttccgtaacaaacgcgccagtgctttcggctctcacggctggagcggcggtgcggtggatcgtctttccacgcgcctgcaggatgcgggtttcgaaatgagccttagcctgaaagcgaaatggcgaccagaccaggacgctctgaagttatgccgtgaacacggtcgcgaaatcgcccgtcagtgggcgctcgcgccgctgccgcagagcacggtgaatacggtagttaaagaagaaacctctgccaccacgacggctgacctcggcccacggatgcagtgcagcgtctgccagtggatttacgatccggcaaaaggcgagccaatgcaggacgttgcgccaggaacgccgtggagtgaagtcccggataacttcctctgcccggaatgctccctcggcaaagacgtctttgaagaactggcaagcgaggcaaaatgagtaacggcattgtgatcatcggtagcggcttcgccgcccgccaactggtgaaaaatattcgcaaacaggacgccactattccattaaccctgattgccgccgacagcatggatgagtacaacaaacctgacctcagccatgttatcagtcaggggcaacgtgccgatgaccttacccgccagacggcgggtgaatttgccgagcagtttaatctgcacctgtttccacaaacctgggtgacggatatcgatgccgaagcccgtgtggtgaaaagccagaataatcagtggcaatacgacaagctagtactggcaaccggtgccagtgcctttgtcccgcctgtgcctgggcgtgagttaatgctgacgttaaatagtcagcaagagtatcgcgcctgtgaaacgcaactgcgggatgcccgacgcgtgttgattgttggcggtggtttgattggtagcgaactggcgatggatttttgtcgtgcaggcaaagcggtcacgctaatcgacaacgctgccagtattctggcgagcttaatgccaccggaagtaagcagccgcttgcagcatcggttgacggagatgggcgttcatctgctgttgaaatctcagttacaggggctggaaaaaacggattctggcattcaggcaacgctggaccgccagcgcaatatcgaagtggatgcggtaattgccgccaccggactgcgcccggaaaccgccctggcacgacgcgccgggctgacgattaatcgcggcgtttgcgtcgatagttatctgcaaaccagtaataccgatatttacgcgctgggcgattgcgcggaaattaacggtcaggtattgccgttcctccagccgattcaacttagcgcgatggtgctggcaaaaaatcttctcggcaataacacgccgctgaaactcccggcgatgctggtgaaaatcaaaacgccggaattaccgctgcatctggcaggcgaaacccagcgtcaggatttacgctggcaaattaataccgaacgccagggaatggtggcgcgcggcgttgacgatgctgaccagcttcgcgcctttgtggtcagtgaggatcggatgaaagaggcatttggattgttgaaaacattgccgatgtaagtgggctactgtgcctaaaatgtcggatgcgacgctggcgcgtcttatccgacctacggggacgcatgtgtaggccggataaggcgtttacgccgcatccggcaatggtgtccaaatgcaacacgttttatccgttctggacttcacccgctaaccaacgcgccgcagcaataaccccctgccccagagacaaaccgccatcacccgccggtaaactctgtggaaagagcaatgtgaaatcagcgagataatgcgccagacgtgcacgcagcaaacggttatgaataaccccgccgctaaataccagcgtagtgataccacgcatcgtggcctgctcacgcatcaacgcggcaaaaccctgcgccagcgcatcatgaaacgcccacgcgcgttgattaaccggtgcctgccagttcagccactgctgccagaaagtggcgagatccagttgattgtccacccgcggcattgtcaccggatgcgtcactccgtggcaactggctgcgagcgcctccagagcacaagccgcttcaccttcataacttaacgtggctggcgcacagcccagtgccgccgccactgcatcgaaaaaacgcccacagctactcgccagcggcgcgttaattccacgctcaatggcccgcgccagcacgctccagttttgctgttgcacacttgctgtttcagagtaattctgccactccggcacaaagcgcaggcactgcgccagcaggtttcgccacggctgcttcgctgccaaatcgccacccggaagcgccactgcaggcaagccgcccaggtgctcacattcgcgatagttcacccgcaggcactcgccgccccacaaagcgccgttctcccccataccgataccgtcgagcgtcaaagcaatgacatcaccgccatccagcggccactgatgctctgccagacacgccgctgcatgggcatgatgatgcagtaccgtttgcgtcggcagattcatttcacgcgcccactggctggagacatagcccggatgcgcgtcatgcacaacgtattgcggggtaaaatcgtagatgttttgcatcaggcgtaacgcttcgcgccactgcatctggatgccatcgtcacttaaatcgcccagatgctgactcaacaccgcttgttcaccgcgcaccaggcagaaggtatttttcagatccgcgccgagacacagcacaggcggaacatttttaaagcccggaggcaaagccagcgcatccggcacatacccccggctacggcgcagcatttcgccgctttcgcgcaccacgctatcatccatccgctgcacgatgtcgcggttatgtatcaagaatccgtcggcaatgccctgcaaatccgccagcgcctgttcgttgctgatagctggtggtttaccgctcaggttgccggaggtcatcaccagcgggcattgcagttcctgtaacagcaaatgctggagcgggttcgcaggcaacattaccccgacttcgttaaggtcaggggcgatatcatcacaaagctcaggaacgtattttttatccaccagcacaatcggcgcggcgggcgtggtaagcaactggcgcgcagcgtctggtaaaccgtcagccactggcaacatgaccgccagcggtttcgccgggcgatgtttgcgcgcccgaagtgtcgccaccgcgttactgttacgtgcatcgcaggcaagatgaaatccgccaatccctttgatggcgacaattttgcccatttttaactgtgcgatagctgcctgtaatgccgcctcttgttccgcatgttcaccatgacttacccattcaagatgcgggccacactccgggcaggccaccggctgggcgtggaagcgacgatcgagcgggtcacggtactctttgtcacaggccggacatagcggaaacgccgccatcacggtaaacgggcggtcgtaaggcatggcgcgaataatggtgaaacgcgggccgcagtgggtacagttgataaacggataacgataacgccgttcgcctggggtattcatttcggcaaggcaagcagggcaagtagcggcatcgggaacaatttgcgtattcatggtgccgcctgtgctctggcgtatagtgaactcggtgggcagttgactccagataaacggctcacgctcgacgctatcaatacgcgccagcggcgggcagtgctgatacaattgaacaagaaacgtttccgggtcttcccgcagccggacttctacgccatcgccgtcattacagacatcgccgtgaagatttaattgctgtgccagctgccagacaaacggacgaaaaccgacgccctgcactttgccacgaatacgcagttggacaccgcaagatgtgttttttgccattgagttattcccgccatcatgaattgcgtaacccgccctgccggacacgacagcgtcgcatccggcagtcacaggtcggcgataccgcccgctccgtattctacgaatatttccgggaattcctttgatgccagaacagttctgtaagatttttagaacatcagcgccgtacggcggcgtttttctgcgctcagttgttcaagtttattacgatcgacacaaatcagcgcatgagtcgggcaagccgccatacacgccgggccgtcttcacgatggttgcacaggtcgcatttattggcttcggctttgtcagcccgtacattcagacccgcgccgctgttgcggatcaccggacgtaccaccacttccatcgcaccatacgggcaagccacaacgcaggttttgcaaccaatgcaacgttcctgcatcacatgaacaaaccctttatcacggctgatagcaccattcgggcagacgttagcgcacggtgcatcttcacactgacggcaaactgtcgccgtggaaatgttcacacctttaatgacatggatacgcggtaaaaaagtttccggggtcaggcttgcacagtcctgattttcctgatgagaaaccacgcacgctacttcacaggtacggcaaccaatacatttactcgcgtcagcaatgatgaaacggttcatcaaattctccagcaatgacagttaatgcgccgatacattcacaaatcatgccagtttttaatttactgttatttaaggaaattaatttctgtaatgcaggaaaaacgatgtcatcgacactagtgacgatgacatgtgatgacaatgtttatcggctaggagcaatgagactgtcgcggcggatcagttttccgctgaaggttttcggcggactgaaatccccgccatcgagcataaaaatcagccgtccaataatttcctgaatcatctcagtcaccggaatttttacgctggagagcgccggaacggtgtagggggcaatagcgatatcatcgaatccgataacactcacctgctctggcaccgctacgccgcgctcgtgtaacgctttcatcgcacctatcgccatatcgtcgttactggcaactaacgcgctaaatttagccccacgttcgagcaacatttctaccccttcggccccgctggcaggcgtccatttaccgttagcgataagtttttcattgagcgcaataccatgctgcgccagcgcgtctttatacccggcaagacgttcaatgctggtgggggaatccatgctgccggtaaggaaagcaatctcctgatgcccggcgtttatcaactctgccacggcgttaaaactggtctgtttatgatcgcaccagacgctatggctgctgtttttgcgcaggcggcgattaagcaccattatcggctgactgtgcgcgtcaatgatgtcatcgatctcatccacgcttaaaaaacgcgggtaaatcatgatcgcgtcgcagcgcagatccagcagatactgaatcgcctggcgctcttcttctgcgctgtgtttaccatctgccaatagcaactgccgccctttctcttccgccattcgcgcggcatgaaagagtaattcactaaaataaatgccgtggtaaagcgtgttggtcactaccagccccagcgtctgagtactcttcgcgctcagattgcgcgccagcaagtttggacggtaaccgctctcttctaccgcctgaaacacgcgatctttagtctcctggctgacgtagccattaccactaagcacgcgggaaacggtcgctttactaaccccggcgcgcttcgccacttccagcatcgtcgtcatcattttcatccctttacacgcaatcaacgcagtgtactgcaccgtttgccgattgtccttgcacaatcggcgggaaaaatattcaggtgaccggtttcacaaatataaaaaatgaacaattcactctcttgcttatttagtgacaactattcatgattttgtgaaaccggtttcttaattccgtttcagcatcggcatttttccgtcacgtcgactgataacaactacatctaccctactgataacaggataaaatccgatggccaaaaattatgcggcgctggcacgcagcgtgatagcggcactgggcggcgttgataacatcagcgcggtcacgcactgtatgacgcggttgcgctttgttatcaaagatgatgcacttatcgacagcccgacgttaaaaaccatccccggcgtgctcggcgtggtacgtagtgacaaccagtgtcaggtgattatcggcaataccgttagtcaagcctttcaggaagtcgtcagcctgctgccgggagatatgcagcccgcacagcccgtgggtaaacccaaactcacgctacgtcgcattggtgcggggatcctcgatgcgctgatcggcaccatgagtccgctgatcccggcgattatcggcggaagcatggtcaaactgctggcaatgatcctcgagatgagcggcgtgctgacaaaaggaagcccgaccttaaccattctgaatgtgattggtgacggtgctttcttcttcctgccgctgatggtcgcggcatctgccgccatcaaatttaaaaccaatatgagcctggcgattgccatcgcgggtgtgctggtacatccgagttttattgaactgatggcgaaagcggcccagggtgaacatgtcgaatttgccctgattccggtcaccgcggtgaaatacacctacacggtgatcccggcgctggtgatgacctggtgcctgagttatatcgaacgctgggtggacagcattacaccggcggtgaccaaaaacttcctcaaaccaatgctgattgtgttgattgccgcaccgctggcaatcctgctgattggcccgattggtatctggatcggtagcgccattagcgcgctggtttacaccattcatggttatctgggctggcttagtgtcgccattatgggcgcgctgtggcctctgctggtaatgaccgggatgcaccgcgtctttacgccaaccatcattcagaccattgccgaaaccggcaaagaagggatggtcatgccgagtgagatcggcgctaacctgagcctgggcggtagtagtctggcagtggcgtggaaaacgaaaaacccggaactgcgtcagacggcgctggctgcggcggcaagtgccattatggcggggatttccgaaccggcgttatatggcgtggcgatccgcctgaaacgtccgcttatcgccagtcttatcagcggttttatttgcggcgcggttgccggtatggcggggcttgccagccacagtatggcagcgccggggctatttaccagcgtgcagttcttcgatccggcgaatccaatgagcatcgtctgggtgttcgcggtcatggcgctggcggtggtgctgagctttatcctcacactgttgctcggctttgaggatattcctgttgaggaagcggctgcccaggcgcgaaagtatcagagcgtacaaccgaccgtcgccaaagaagtaagtcttaattgaggatgaaaatgagtgtatttccagaaagttttttatggggcggcgcgcttgccgccaaccagtctgaaggtgcgttccgtgaaggtgacaaaggtctgaccactgtcgatatgatcccacacggcgagcatcgaatggcggtgaaactggggctggaaaaacgttttcagttgcgagatgacgagttttatcccagccatgaggcgacggatttttatcatcgttataaagaagatatcgccctgatggcagagatgggattcaaggttttccgtaccagtattgcctggagccgtctctttccgcagggcgatgaaatcacgcccaatcagcagggcattgctttttatcgttctgtctttgaagagtgtaaaaagtacggtatcgaaccgctggtcacgttgtgccacttcgatgtgccgatgcatctggtcaccgaatatggctcctggcgtaaccgcaagctggtggagtttttcagccgctacgccagaacctgctttgaagcatttgatggtctggtgaaatactggctaaccttcaatgaaatcaacattatgttgcatagcccgttctccggcgcgggtctggtgtttgaagaaggtgaaaatcaggatcaggtgaaatatcaggccgcgcatcaccagctggttgccagtgcgctagccaccaaaatcgcccatgaggttaacccgcaaaatcaggtgggctgtatgctggcgggcggtaacttctacccttacagttgcaagccggaagatgtctgggcggcgctggagaaagaccgggaaaacctgttttttatcgatgtgcaggcgcggggcacgtatccggcttactctgcccgcgtattccgcgaaaaaggggtaaccatcaacaaagcaccgggcgatgatgaaatcctgaaaaacaccgtcgattttgtctctttcagctattacgccagccgctgcgccagcgcggagatgaacgccaacaacagcagtgcggcgaacgtggtgaaaagcctgcgtaatccgtatctacaggtgagcgactggggctggggaattgatccactcggtctgcgtatcaccatgaatatgatgtacgatcgttatcagaagccgctgtttctggtggaaaacggcctgggcgcaaaagatgaatttgctgccaatggcgagattaacgacgactatcgcatcagctacttacgcgaacatatccgcgcaatgggcgaagcgattgcagacggcattccgctgatgggctacaccacatggggctgtattgatttagtttccgcctctacgggtgaaatgagcaaacgctacggctttgtctttgttgaccgtgacgacgcaggcaacggtacgctgacgcgcacgcgtaagaaaagtttctggtggtataaaaaagtgattgccagtaatggggaagatttagagtaagtaacagtgccggatgcggcgtgaacgccttatccggcctacatgtcgcacgaaccatgaaggcccgataagcgcagcgcatcgggcaatttagcatttggcatcagagctggttcaccccatcaagaacatccctgtcctgattccttaatgaaaaattactcttcttccaccgctaactgcgcgaagccgccatttccttcccagccttccagtcgttgataaacggtttctaccgcatctttaatcggctgggtcatcgggtagtaaaagccgacgatatccggctgaatgccgaggaaaatcacttcgccaatatcttctttcaactggtcgataaggtaattcaacggcatgttatgggtagtcatcataaacatctcggcgatatcatccgggtcgatgatgcggatctcgccggggtttagccccatatccgtggcgtcgacaatcagcagtcgtgtcgggcgcagttcacggatagcgacgatgtcgttttccggtgcgctaccgccgtcaatcaccacccagttacctttcggcgcggcggcgcacttttccgccagcagcggacctgcgccatcatcgcccatcatgctattgccaacacagagtaaaacgtcagtcacgcagtctcctcaccatcaaatagatggcgttttcctgatgaatatcatgcagcatacttaacagcattgtactccattcctgctgctggctagtttgcgctgcccgggctttatcgaatgcgttggccagcatcggcacatggttaatgtcgatgacgatctcaccatatttcggcacgccttccattttgcggcgggcttcactgcctgcctccagagtggcaatccatgccagatattcatcccacgggcaggtgagcgccgcttccaggcaatcgataaccccaaggtggtgaccaatcgccaggctgtaatagaccacctgctgcgcctcggcgggcgtggcatcgttctcatcaataaatttatggctcagttgactgaacaccaccttttcactcatcggatacgcgcctcttcaacaacatgattcagatggctgacaatctcgttcagacgcggatcgttttccgcttccagccagcgtgcaacctgttcttcgccctgccctaactgtgtaaggtaatcatcggcaatctgacgaccgtaacgataacccgccaggcgacgtgcttcgcgatccactttcacgcgcagcggctgcaccatatcaccatgcaggatctccgccggttgttcatccagttcacccggcccacgggcgtgaattttctgctccagcaggccgagcgccattgcaaagccgtacagcgtggcggcaggcgttggcgggcagccagggatataaacatccacagggacaattttatccgtaccgccccacacgcagtagagatcgtggaagatcccgccactgttaccgcaggcaccgtaggagatacaaattttcgggtccggcgcggactgccacgcacgcagcgcaggggatcgcattgcacgggtgaccgcgccggtaaacagtaaaatatccgcatgacgcggactaggaacgactttaatgccgaagcgttctgcatcaaacagcgggctaagcgtggcgaaaatttcgatttcgcaaccgttgcagccgccgcagtccacgcggtaaacataggcagaacgtttgatttttttcagtaagctcgccttcatgctggcgatggattcatccaccgtcatggggaccggaatgccgttggcgtcacgggggcctaataaattgctcatcagatggcctctttcatatggcgagtcagttcaatacggtcggacggcaccaggcatttctggcgcttacattccgggcaagtctcaaagctttcgcggtggttttccgcgcggctgtcgccgttgtgcttaagcagcgcaatggcgtagtcgatctctttctggacggcgaaaggacgattgcagacgcggcagttgcacagcgcgaagcgggactgttgcaggaagtcttctttcttccacaccgccagttcgtactcttggctcagtttgatcgccgccgtcgggcagacttcttcgcagcgtccacagaagatgcagtgcccaagattaaactcccaggcaagctctcctgtggcgaggtcagtttcaaccgttaaggcgttactcgggcaggcattgacgcaggccgcgcagccgatgcactgctgcgggttctgctctggcttaccacggaagtttttatcaaccgcaatcggctccagcggataagagctggtcgccgtgccggttttgatgacttttttgataaaggtaaacatggcgattccttatttcagcgggctgtttttacgctcaatgctgtaacgctcgagttctttgtacggcaccactttgctcttcttcttacgcacatcgaccacggtcatgcggtcggtacaggagtagcaagggtcgaggctaccgataatcagcggcgcatcggaaacggtgttgccgcgcagcatgtagcgcagggtcggccagttcgcgtaggtcgcggcacggcagcgccagcggtacagcttctggttgtcgccggtcatgctccagtggatatcatcgccgcgcggcgcttcggcaaagcccagcgcaaagcggtgcggaatgtaggtaaagccttccaccatcagtgggccacccggcaggttatccagaccgtagtcgatcatgttcagcgcggtatagacttcgttgatacgcactttcagacgggaaataacgtcgcagccctgctcgctgtggacttccattggcagcaggccatagccgacaaacgggtgatcggcgcgggtatcacgggcgtgaccgctggcacggaccatcgggccgacgttactgaagtcgcgagcgatttccgggtccagacgaccaatgccgacagtgcgctgttccatgttcggagtgctcagcagcacatccaccagctcctgcacttcacgacgcatctgttgtgccagctggcgggtctggatcatgtcgtctttcagcagatcgcgacgaatcccgccgatcaagttcaggccgtaggttttacgcgcaccggtaaggatctctgccattttcatggaggtttcacgcacgcggaagaactgcataaagccggagtcgaagccggtaaagtgacaggccaggccaaggttgagcagatggctgtgcaagcgttctacctccagcagaatggcgcggatcatctgcgcacgttctggcacctgaatacccatcgcgttttccacgctcgtggtgtaggcggtgctgtgggcaaagccgcagatcccgcacacacggtcagagaggaaggtcacttcgttataacccatacgggtttccgccagtttttccatgccgcgatggacgtagaacagacggtagtcggcgtcgataatgttttcgccatcgacgaacagacggaagtggcccggttcatcagaagtgacgtgcagcggaccaatcggcacgacgttgtttttcttgtcgcccagttcgttgatgaactcgtaggtttcagcatcggtggtcggtgccggacgctgacgataatccatgctgtctttacgcagcggataaagttcatccggccagtcatccggcagcaccagacgacgttcatccggcagaccaaccggaatcaaaccgtacatatcgcgcacttcacgctcgccccacaccgccgccggaacgcgcggcgtcacggacggatattccggtttgttggcgtcaacttcgacgcgaaccgtaatccaacacttagtgcccttctccatgctcagcacgtagtaaacggcgtaatgaccattcagtttgcgttcgtcgttaccaaacagcacgctcagccagccaccctgtttgtagtaaagaaactccaccacttccggcaggtagttcacctttacggtgacagtcagctgatctttggtctgccaggcgtggtccagcacgacgcccggaaatgcctcattcagcgcggcgagataatgttgacctaatttttcttcagacatgctcaaactctctttaatcacgccgccagcaaggagacgaacgctaaaaatgcaaagccaaacccagcccaggtaatgcgcggagtaatatcaagacgcagacgggccatgctgttttcgaacagcgcgataaccaggacgccgaccaccagttttacgatggcaatcaccagcgccagcagcagtccaccggcggtgaaggtttccatttgtccccacggaataaacaccccgacgaacatctgcaacaccaccagctgtttcaggctgataccccatttcatgacgccaaagccgctgccgctgtattcagagagcgggccttcctgcagctcctgctcggcttccgccaggtcgaacggcagtttgcccatttcgataaaggtggcgaacgcacaggcacaaagcgccagtaccagcgggatgctctggctcagcggccagtgataaacggtgtcggtgatgttgctgatgttggtggaaccggcaacctgtgcggcaacccacagaccaagcagcagcatcggttcgaccagcacgccaagcatcgcttcacggctcgcgccgatagcggtaaacgggctaccggtatccagaccagaaatggcaaagaagaaacgcgcgatggcaaagagatacagtaaggtgatcaaatcacccagttgcggcagcggagaaccgacggtcaccaccggcagcgcagtagcgatagtcagcatgacgcccaccatcacatacggcgtcaggcggaacacccagccggaggcatccgggccgacgctctgacgccccagcagtttgataatgtcgcgatactcctgcaacacgcccggcccgcgacggttatgcaagcgggcgcgcgccacgcgggttataccggagagcagcggcgcaacggcaaataacaccagcgcctgaattaacggatataaaacactcattctcaggctcctcgactaacaataatcaccaccagtaccgccagttcaaccagcgccatccggcggaacagcaacgcactcccctcgcactgccagcccggcaccagagacaccggattcagccatttgcgtagtttcagcaccggcgcaaacgcctgtttcaccggcatggcaaaaccgtgagcggtaatcaccatacttttttcgtggtcgtaaccgcacacccaggccgcaccgcgggaacggcttggcaaacgatcgcctttgcaaatcgccataatgatgaatggcagcagcgggcaggcaatcagcagcaacgtgatcatcggttgagaaacggtggtgttagcaggctccagcggcagaggtacagcagcagagagcatcggcagtagccacggcgcagcaacaccgccaattacgcagcaaatcgccagtgccactacgcttacgctcatcaggagcggcgcacaggtggcgttttcggcttctttggtgcgcggcgcgccgaggaacgtgacgccatagactttcgccatacacatcaccgccagcgcaccggtaattgccagccccacagcgagcagcggccccagcagacgggcaacaaacgcgccactattgctcagtttgaaaaaactttgatagataacccattccccggcaaaaccattcagcggcggcagcgcagccattgccatcagcccgactaacatggcgatggagataaccggcattttcttgccaataccaccgagtttttcgatatcgcgatgaccggtacggaaccagacgctccccgccccgaggaacagtacgcttttgaacaggctatggttaagcagatggtacagaccaccgaccaggccaagagcaatcagcgccggttgttcgagcgcgatacccgttacgccagcgcccagccccagcaggatgatgccgatattttccagggtgtggtaagccagcaggcgctggatgttgtgctccaccagcgcatacagaccaccgacaaacgcggtgatcatgccgagcaccagcagcgcgatcccccaccacagcggtgcattaccgcccagcagactcagggttaaaatgcccagcaggccaattttcatgactaccgtagaaaacaacgcggcagctggcgcagaggcgttcgcatgtgcctgcggcacccagccgtgcagcggaataatcccggccagcaggccaaagccaatcactccgagcagccagatatcggaaccgagcggcagctgttgcatacgcatatccagcaggcgcagatccagcgtgccgtaacgctgccacagcagccagcaagcaatcgccagcagcagagtgccaagacgccccagcgcaaaccacagtttgccctctttgctgttgctggtgaggaacaccgcgcacagggccatgatttcggccattaccacgaacatgccgaggttgctggcaatgacggcgcagacggcggcagccatcaacatattgatctgcaagccgttgcacttcacctgcgcgtggcgatgccagtcaatgttgtagaggctgacaaacagaccgcacagaccgagcgtaatcagccaaatcgcgttaagcggagagatttgcacatcgtagcttaccaggctcagcgcaccgctcacgccaaccgcgccagtcagtacagtgaagcccgcggctgccgtatacagactaccaaccgcgccgccaattccagctatccagccacttaacgctttttgaaaagaaaagagaaatgccagaacagcggcggcgacaaaccacgccacgccgctattgatcagggaaattgcgctcatttagcctctccactttgagcctgctgaaacaaggtgagatcgccaaagtccgtgttaaaggtcagctcacgcttacgtttgctgacgcgggcgatatcggtgttatccaccagatgcagggctttagtcgggcacatccgcacgcaggccggaccttgttcatcaaagctacaaaggtcacatttgacggcgatcgcgcgaatacctggcacccagtcaagcaatgtgctgacacgcgccggagcaggcggtgccggtggcgctttcggggtattggcgtttgccggaatatccagcggacggctgccggaaaattcaattgcgccaaacgggcaggcgatgccgcacagcttgcagcttacgcacaggctttcattcaactgcacggccccatcgacgcgggtgatggcgttaaccgggcagaccaccgcgcagggtgcatcttcacagtggtgacagagctgcggcgcagattctttttcattcagcatcactctcaggcgcggcatactttgcaggccgtgctggcgatgcgtctcactacaggcggcctcacaagtgtggcagccgatacagagcgtggagtcagcaattacaaaacgattcaccaggcattcctcaggtgattgtcatttttgacgaaaacatgccgatgaaatgtcattttcgacactcatcgacacgcccatccccaaacaggcgtaacgcctgcaaaacgggcaaagcctcagctcatgctgccgggctttgtccctttaccagttggcttaaattcaccggcacattgttttcaatagcggtgtataagctgtcgtaaacgccagcgattttttcgagatagtgttccagaacctgttcgcgatcgcggatgttgaccttgccatcaatcatgccgtcaatgctcagttgcgcctgcgcaatccgctgtttgtcttcgccatcttttgtttcgacgtaatactcgatggtgtggctgttaaagccatccgccagggtgacgtaaatgcgaaaatgttcaaaaaggacgaaacagagttctttgtccggcgcgcagctcatggcgtgatgcaggcgcgctttgcttaacgtgatcccctgaaccaggctattgcagtagatgtgccactggtcctgtaggcgacgatgccgctgtgcgatgtaatcggctttctcgcttatttcccaaatagtcattgtcaggttacccgtttaacagagatgccagctttaagcattttttgtgccaacttttaatttattgttattaaagagatttttaagctaaagatgaatttcgtcgccgtgtcgacgtgtcatttcgacatcatcgacattattcaccgcagggataatcaacactggcacaattattgcttgtagctggcaatagttaatgggaggcgatatgcacgaaataaccctctgccaacgggcactggaattgatcgaacagcaggccgcaaaacacggcgcaaaacgcgtaactggggtctggctcaaaattggcgcattttcttgtgtcgaaaccagctctcttgccttttgttttgatctggtttgccgcggcagcgtggcggaaggttgtaaactgcacctcgaagaacaagaggccgaatgctggtgtgaaacatgccaacagtatgtgacgctactgacccagcgcgtccgccgctgtccacagtgtcatggtgacatgctgcagattgtggcagacgacggtttacagattcggcggatagaaatagaccaggagtgagcgatgtgtacaacatgcggttgcggtgaaggcaacctgtatatcgagggtgatgaacataaccctcattccgcgtttcgtagcgcgccatttgccccggcggcacgcccgaagatgaaaatcaccggcattaaagcgcctgaatttacccccagccagactgaagaaggcgacctgcattacggtcatggcgaagcgggcactcacgcaccgggcatgagccagcgtcggatgctggaagtcgaaattgacgtgctggacaaaaataaccgtctggctgaacgcaaccgcgcgcgctttgctgcccgcaagcaactggtgctcaacctggtttccagccctggttccggtaaaaccaccctgctgacggaaaccctaatgcgcctgaaagacagcgttccgtgcgcagttattgaaggcgaccagcaaaccgtgaacgatgccgcacgcattcgcgctaccggcacaccagcgattcaggtgaacaccggtaaaggctgccatcttgacgcacagatgattgccgacgccgcaccgcgtctgccactggacgataacggtattctgtttatcgaaaacgttggcaacctcgtatgcccggccagcttcgatctcggtgaaaaacacaaagtggcggtgctttccgttaccgaaggtgaagacaaaccactgaaatatccgcatatgtttgccgccgccagcctgatgctgctcaacaaagttgacctgttgccgtatctcaactttgacgttgaaaagtgcatcgcctgcgcccgcgaagtcaatccagaaattgaaatcatccttatttccgccaccagcggcgaagggatggaccagtggctgaactggctggagacacagcgatgtgcataaggtaaaactggctggagacacagcgatgtgcataggcgttcccggccagatccgcaccattgacggcaaccaggcgaaagtcgacgtctgcggcattcagcgcgatgtcgatttaacgttagtcggcagctgcgatgaaaacggtcagccgcgcgtgggccagtgggtactggtacacgttggctttgccatgagcgtaattaatgaagccgaagcacgcgacactctcgacgccttacaaaacatgtttgacgttgagccggatgtcggcgcgctgttgtatggcgaggaaaaataatgcgttttgttgatgaatatcgcgcgccggaacaggtgatgcagttaattgagcatctgcgcgaacgtgctagtcatctctcttacaccgccgaacgccctctgcggattatggaagtgtgtggcggtcatacccacgctatctttaaattcggcctcgaccagttactgccggaaaacgttgagtttatccacggtccggggtgcccggtgtgcgtactgccgatgggtagaatcgacacctgcgtggagattgccagccatccggaagtcatcttctgtacctttggcgacgccatgcgcgtgccggggaaacagggaagcctgttgcaggcaaaagcacgcggtgccgatgtgcgcatcgtttacagcccgatggatgcgttgaaactggcgcaggagaatccaacccgcaaagtggtgttcttcggcttaggttttgaaaccactatgccgaccaccgctatcactctgcaacaggcgaaagcgcgtgatgtgcagaatttttacttcttctgccagcacattacgcttatcccgacgttgcgcagtttgctggaacagccggataacggtatcgatgcgttcctcgcgccgggtcacgtcagtatggttatcggcaccgacgcctataattttatcgccagcgattttcatcgtccgctggtggttgctggattcgaaccccttgatctactacaaggcgtggtcatgctggtgcagcagaaaatagcggcccacagcaaggtagagaatcagtatcgtcgagtggtaccggatgccggtaacctgctggcgcaacaggcgattgccgatgtgttctgtgtcaacggcgacagcgaatggcgcggcttaggcgtgattgaatcttctggcgtgcacctgacgccggattatcaacgattcgatgccgaagcacatttccgcccggcaccgcagcaggtctgcgatgacccgcgcgcgcgttgtggtgaggtattaacgggcaaatgtaagccgcatcaatgcccgctgtttggtaacacctgtaatcctcaaaccgcgtttggtgcgctgatggtttcctccgaaggagcgtgcgccgcgtggtatcagtatcgtcagcaggagagtgaagcgtgaataatatccaactcgcccacggtagcggcggccaggcgatgcagcaattaatcaacagcctgtttatggaagcctttgccaacccgtggctggcagagcaggaagatcaggcacgtcttgatctggcgcagctggtagcggaaggcgaccgtctggcgttctccaccgacagttacgttattgacccgctgttcttccctggcggtaatatcggcaagctggcgatttgcggcacagccaatgacgttgcggtcagtggcgctattccgcgctatctctcctgtggctttatcctcgaagaaggattgccgatggagacactgaaagccgtagtgaccagcatggcagaaaccgcccgcgcggcaggcattgccatcgttactggcgatactaaagtggtgcagcgcggcgcggtagataaactgtttatcaacaccgctggcatgggcgcaattccggcgaatattcactggggcgcacagacgctaaccgcaggcgatgtattgctggtgagcggtacactcggcgaccacggggcgactatccttaacctgcgtgagcagctggggctggatggcgaactggtcagcgactgcgcggtgctgacgccgcttattcagacgctgcgtgacattcccggcgtgaaagcgctgcgtgatgccacccgtggtggtgtaaacgcggtggttcatgagttcgcggcagcctgcggttgtggtattgaacttagtgaagcggcactgcctgttaaacctgccgtgcgtggcgtttgcgaattgctgggactggacgccctgaactttgccaacgaaggcaaactagtaatagctgttgaacgcaacgcggcagagcaagtgctggcagcgttacattcccatccactggggaaagacgcggcgctgattggtgaagtggtggaacgtaaaggtgttcgtcttgccggtctgtatggcgtgaaacgaaccctcgatttaccacacgccgaaccgcttccgcgtatatgctaataaaattctaaatctcctatagttagtcaatgaccttttgcaccgctttgcggtgctttcctggaagaacaaaatgagttatacaccgatgagtgatctcggacaacaagggttgttcgacatcactcggacactattgcagcagcccgatctggccagcctgtgtgaggctcttagccaactggtaaagcgttctgcgctcgccgacaacgcggctattgtgttgtggcaagcgcagactcaacgtgcgtcttattacgcgagccgtgaaaaagacacccccattaaatatgaagacgaaactgttctggcacacggtccggtacgcagcattttgagccgccctgatacgctgcattgcagttacgaagaattttgtgaaacctggccgcagctggacgcaggtgggctatacccaaaatttggtcactattgcctgatgccactggcggcggaagggcatatttttggtggctgtgaatttattcgttatgacgatcgcccctggagcgaaaaagagttcaatcgtctgcaaacatttacgcagatcgtttctgtcgtcaccgaacaaatccagagccgcgtcgttaacaatgtcgactatgagttgttatgccgggaacgcgataacttccgcatcctggtcgccatcaccaacgcggtgctttcccgcctggatatggacgaactggtcagcgaagtcgccaaagaaatccattactatttcgacattgacgatatcagtatcgtcttacgcagccaccgtaaaaacaaactcaacatctactccactcactatcttgataaacagcatcccgcccacgaacagagcgaagtcgatgaagccggaaccctcaccgaacgcgtgttcaaaagtaaagagatgctgctgatcaatctccacgagcgggacgatttagccccctatgaacgcatgttgttcgacacctggggcaaccagattcaaaccttgtgcctgttaccgctgatgtctggcgacaccatgctgggcgtgctgaaactggcgcaatgcgaagagaaagtgtttaccactaccaatctgaatttactgcgccagattgccgaacgtgtggcaatcgctgtcgataacgccctcgcctatcaggaaatccatcgtctgaaagaacggctggttgatgaaaacctcgccctgaccgagcagctcaacaatgttgatagtgaatttggcgagattattggccgcagcgaagccatgtacagcgtgcttaaacaagttgaaatggtggcgcaaagtgacagtaccgtgctgatcctcggtgaaactggcacgggtaaagagctgattgcccgtgcgatccataatctcagtgggcgtaataatcgccgcatggtcaaaatgaactgcgcggcgatgcctgccggattgctggaaagcgatctgtttggtcatgagcgtggggcttttaccggtgccagcgcccagcgtatcggtcgttttgaactggcggataaaagctccctgttcctcgacgaagtgggcgatatgccactggagttacagccgaagttgctgcgtgtattgcaggaacaggagtttgaacgtctcggcagcaacaaaatcattcagacggacgtgcgtctaatcgccgcgactaaccgcgatctgaaaaaaatggtcgccgaccgtgagttccgtagcgatctctattaccgcctgaacgtattcccgattcacctgccgccactacgcgagcgtccggaagatattccgctgctggcgaaagcctttaccttcaaaattgcccgtcgtctggggcgcaatatcgacagcattcctgccgagacgctgcgcaccttgagcaacatggagtggccgggtaacgtacgcgaactggaaaacgtcattgagcgcgcggtattgctaacacgcggtaacgtgctgcagctgagtttgccagatattgttttaccggaacctgaaacgccgcctgccgcaacggttgtcgccctggagggcgaagatgaatatcagttgattgtgcgcgtgctgaaagaaaccaacggcgtggttgccgggcctaaaggcgctgcgcaacgtctggggctgaaacgcacgaccctgctgagtcggatgaagcggctgggaattgataaaagcgcattgatttaactgcaaattgccggacagatctgcctgtccggcatattattcatgaggttttttcggacgatatttttccggcagttctggcaccggacgcttgtcatcgatgagatgacgcacggttaagatcggatgacgccacagcattctcggcccggcccaacgcataatctgtttcatctcttcacgctttgcaggctggtaacagtgcaccggacactgcttacaggctggtttctcttcgccgaacacacatttatccagccgcttttgcgcgtaaacaaacaacgcctcgtaatgctccggctccgcactcgcctgcgggcatttcgcttgataaagatcgatcatttttttaatcgtcagtttttcacgagagatacgcttgccggacatgctgcctccacctcattaagatgtatttatattacatcttaatcttaaagggcactatgactccaaagaagaagggttagccaaccgatacaattttgcgtacttgcttcataagcatcacgcaaaagctgcaaaacagcatctttcccggaaccagcatcaagaactcgccgttcgcttcttcccctgaaatgattaactccggtatcatgtgcgccttatgtgattacaacgaaaataaaaaccatcacaccccatttaatatcagggaaccggacataaccccatgagtgcaatagaaaatttcgacgcccatacgcccatgatgcagcagtatctcaggctgaaagcccagcatcccgagatcctgctgttttaccggatgggtgatttttatgaactgttttatgacgacgcaaaacgcgcgagccaactgctggatattagtctgaccaaacgcggtgctagcgcgggagagccgatcccgatggcggggattccctaccatgcggtggaaaactatctcgccaaactggtgaatcagggagagtccgttgccatctgcgaacaaattggcgatccggcgaccagcaaaggtccggttgagcgcaaagttgtgcgtatcgttacgccaggcaccatcagcgatgaagccctgttgcaggagcgtcaggacaacctgctggcggctatctggcaggacagcaaaggtttcggctacgcgacgctggatatcagttccgggcgttttcgcctgagcgaaccggctgaccgcgaaacgatggcggcagaactgcaacgcactaatcctgcggaactgctgtatgcagaagattttgctgaaatgagcttaattgaaggccgtcgcggcctgcgccgtcgcccgctgtgggagtttgaaatcgacaccgcgcgccagcagttgaatctgcaatttgggacccgcgatctggtcggttttggcgtcgagaacgcgccgcgcggactttgtgctgccggttgtctgttgcagtatgcgaaagatacccaacgtacgactctgccgcatattcgttccatcaccatggaacgtgagcaggacagcatcattatggatgccgcgacgcgtcgtaatctggaaatcacccagaacctggcgggtggtgcggaaaatacgctggcttctgtgctcgactgcaccgtcacgccgatgggcagccgtatgctgaaacgctggctgcatatgccagtgcgcgatacccgcgtgttgcttgagcgccagcaaactattggcgcattgcaggatttcaccgccgggctacagccggtactgcgtcaggtcggcgacctggaacgtattctggcacgtctggctttacgaactgctcgcccacgcgatctggcccgtatgcgccacgctttccagcaactgccggagctgcgtgcgcagttagaaactgtcgatagtgcaccggtacaggcgctacgtgagaagatgggcgagtttgccgagctgcgcgatctgctggagcgagcaatcatcgacacaccgccggtgctggtacgcgacggtggtgttatcgcaagcggctataacgaagagctggatgagtggcgcgcgctggctgacggcgcgaccgattatctggagcgtctggaagtccgcgagcgtgaacgtaccggcctggacacgctgaaagttggctttaatgcggtgcacggctactacattcaaatcagccgtgggcaaagccatctggcacccatcaactacatgcgtcgccagacgctgaaaaacgccgagcgctacatcattccagagctaaaagagtacgaagataaagttctcaccagtaaaggcaaagcactggcactggaaaaacagctttatgaagagctgttcgacctgctgttgccgcatctggaagcgttgcaacagagcgcgagcgcgctggcggaactcgacgtgctggttaacctggcggaacgggcctataccctgaactacacctgcccgaccttcattgataaaccgggcattcgcattaccgaaggtcgccatccggtagttgaacaagtactgaatgagccatttatcgccaacccgctgaatctgagcccgcagcgccgcatgttgatcatcaccggtccgaacatgggcggtaaaagtacctatatgcgccagaccgcactgattgcgctgatggcctacatcggcagctatgtaccggcacaaaaagtcgagattggacctatcgatcgcatctttacccgcgtaggcgcggcagatgacctggcgtccgggcgcagtacctttatggtggagatgactgaaaccgccaatattttacataacgccaccgaatacagtctggtgttaatggatgagatcgggcgtggaacgtccacctacgatggtctgagcctggcgtgggcgtgcgaggaaaatctggcgaataagattaaggcattgacgttatttgctacccactatttcgagctgacccagttaccggagaaaatggaaggcgtcgctaacgtgcatctcgatgcactggagcacggcgacaccattgcctttatgcacagcgtgcaggatggcgcggcgagcaaaagctacggcctggcggttgcagctctggcaggcgtgccaaaagaggttattaagcgcgcacggcaaaagctgcgtgagctggaaagcattagcccgaacgccgccgctacgcaagtggatggtacgcaaatgtctttgctgagtgtaccagaagaaactagccctgcggtcgaagctctggaaaatcttgatccggatagtctcaccccgcgtcaggcgctggagtggatttatcgcttgaagagcctggtgtaataacaattcccgatagtcttttgctatcgggaatattaacgacaactgacgaataaaataaaaacaccctgtataataggaaagcttattttacagggtaaaaccatgccatctacacgctatcaaaaaatcaatgcccatcactatcgccatatatgggtcgttggtgatattcatggtgaatatcagttattacaatcccgcttacatcaactctcttttttccccaaaatcgacttacttatttctgtcggcgataatattgatcgtggaccggagagtcttgacgtcctgcgcctgctaaaccaaccctggtttacgagcgttaaaggcaaccacgaagcgatggcgcttgaggcattcgaaactggcgatggcaatatgtggcttgccagcggtggtgactggtttttcgatttaaatgatagtgagcaacaagaggcaatagatctgttgctgaaattccatcaccttccacatattattgaaatcactaacgacaacataaaatatgccatcgcacatgcagattatccggggagtgaatatctctttggtaaagaaatagcggagagcgaattactctggcctgttgatcgtgtgcagaaaagccttaatggcgagttacaacaaataaacggcgctgattattttatatttggacatatgatgtttgataacattcagacgttcgctaaccagatttatattgataccggaagcccgaacagcgggcggctgagtttttataaaataaagtaatctcatgcttcttctgtgaagcatgagtaacccggtgttattgcaggccattattcatttttcgctaccagcaaagagagatcctgcttcaccagcgcgcgactggcactctccggcaaaccgtcgtctgtaataatctgatcaaactcgcttaatggtaacgccagccatgtcgccacctgaccatatttcgtcgcatcacagaccaaaactcgctggcggctggcactggcaatcgcccgtttcaccgtgactttatcttccgctggcgtagaaatcccccgcacactccaactgcttgcagaaataaaagcctgatcaatcatcaggctgcgcagcatggtcgcagcggcttccccgacacaggaacggttttcccgacacactgcaccgccagtgtgaataattgtgcaattactgttgtcgagcaagtagtccgcaataacgaaatcgtttgtgaccacagtcagactctccatgtgaatcagatgctgtgctatcgctaacgtggtcgttcccgcatccagatagatacaacttcccggctgaacaagacttgccgccagcttgccaatagccgctttttgcgtcattgccagcgcagtttttacctgatgagaaggttcatgcgccacgcgtcccggagactggacgcctccggacaccagcacaacggctccctgctgctccagtttttgtaaatcccgacgaatggtcatatgactcacattcattctgtccgttagttcagcaatactgacaatgcctttttcagctaccatctcaaggatgatttggcgacgctctacgggtatcaacttttgctccttcctttgtcctgcactcattctacgctatttgcctgcgaaacgtgcgcggcgcaactaacgcttagttcacataaaataacacacaatgttaatttatgtgaatcagatcaccataccgttatcttccagcgcttatattcacaatatcaaacaaaatatcacttaaattaacaaggagagcagatgaaaacgggatctgagtttcatgtcggtatcgttggcttagggagtatgggaatgggagcagcactgagttatgtccgcgcaggtctttctacctggggcgcagacctgaacagcaatgcctgcgctacgttgaaagaggcaggtgcttgcggggtttctgataacgccgcgacgtttgccgaaaaactggacgcactgctggtgctggtggtcaatgcggcccaggttaaacaggtgctgtttggtgaaacaggcgttgcacaacatctgaaacccggtacggcagtaatggtttcttccactatcgctagtgctgatgcgcaagaaattgctaccgctctggctggattcgatctggaaatgctggatgcgccagtttctggtggtgcagtaaaagccgctaacggtgaaatgactgtcatggcctccggtagcgatattgcctttgaacgactggcacccgtgctggaagccgttgccggaaaagtttatcgcataggtgcagaaccgggactaggtagcaccgtaaaaattattcaccagttgttagcgggcgtacatattgctgccggagccgaagcgatggcacttgcagcccgtgcggggatcccgctggatgtgatgtatgacgtcgtgaccaatgccgccggaaattcctggatgttcgaaaaccggatgcgtcatgtggtggatggcgattacaccccgcatagtgccgtcgatatttttgttaaggatcttggtctggttgccgatacagccaaagccctgcacttcccgctgccattggccagtacagcattgaatatgttcaccagcgccagtaacgcgggttacgggaaagaagacgatagcgcagttatcaagattttctctggcatcactctaccgggagcgaaaagttgagctaaactctaccgggagcgaaatcatgatcaagattggcgttatcgccgatgattttaccggcgcgacggatatcgccagttttctggtggaaaacggtctaccaacggtacaaattaacggtgttccaacaggtaaaatgccggaagcaatcgacgcactggtgatcagcctgaaaacgcgctcctgtccagtggttgaagccacacagcaaagcctggcggctctgagctggttgcaacagcaaggttgcaaacagatctatttcaaatactgctctactttcgacagtacggcgaaaggtaatattggcccggttaccgatgccttaatggatgctctcgacacgccgtttacggtcttctctccggccctgccggtcaacggacgtacggtttatcaggggtatttgttcgtaatgaatcaactgctggccgaatccgggatgcgccatcacccggtaaatcccatgaccgacagctatcttccccgtctggttgaagcgcaatccacagggcgctgcggcgtcgttagcgcacatgttttcgaacaaggtgtggatgccgttcgtcaagagctggctcgcttacagcaagagggctaccgctacgcggtgcttgatgcgctgaccgaacaccatctggaaattcagggagaagccttgcgcgatgccccactggtaacgggcggttctggtctggcgattggcctggcccggcagtgggcgcaagaaaacggtaaccaggctcgcaaagcagggcgtccgctcgctgggcgcggcgtagtgctctccggtagttgctctcaaatgaccaaccgccaggtagcacattaccgtcaaattgcaccagcccgtgaagttgatgtggcacgctgcctcagtattgaaactctggccgcttatgcacacgaactggcagagtgggttctgggccaggaaagtgtacttgctccactggtttttgccaccgccagcactgacgcattggcagcaattcaacagcaatacggtgcacaaaaagccagtcaggcagtagaaacactgttttctcaactagcggcgcggttagcagcggaaggcgtgacacgctttattgtcgcaggcggtgagacctccggcgtagtcacacagagcctgggaataaaagggtttcatattggcccaaccatttccccggcgtgccgtgggtaaacgcactggataagcctgtctcactcgcccttaaatctggcaacttcggtgatgacgcctttttttcacgagcccaaagagagtttttatcatgagcgatttcgcaaaagtagagcagtctttgcgagaggagatgacgcggattgccagtagtttctttcagcgcggctatgcaaccggtagcgctggcaatctgagcctgcttttacctgacgggaatttactggcgacaccgacaggtagttgcctgggcaatctcgatccgcagcggctttccaaagtcgccgcggatggcgaatggttaagtggtgacaaacccagcaaagaggtgctctttcatctggcgctgtatcgcaacaatccgcgctgtaaagcggtggtgcatttgcacagcacatggagcacggcgctttcctgcctgcaagggctggacagcagcaacgttattcgtccgttcacaccatacgtggtgatgcggatgggaaatgtcccgctggtgccttattaccgaccgggcgataaacgcatcgcacaggatctggcggaactggcagcagacaatcaggcttttttactggcaaatcatggcccagtggtttgcggtgaaagcctgcaagaagccgccaacaatatggaagagctggaggaaacggcaaagctgatttttattctcggtgaccgcccgatccgttatctgaccgcaggtgaaattgcggaattaaggagttaatgcaatgcctcgttttgcagctaatttatccatgatgttcaccgaagtgccttttattgaacgcttcgccgcagcgcgaaaagccgggttcgatgctgtggaatttctgtttccctataactactccaccctgcaaatccaaaagcaactggagcaaaaccatctgacactggcgctgttcaataccgctcccggagatattaatgcgggggaatggggattatccgcccttcccggacgtgagcacgaagcacacgcagacatcgacctggcactggaatatgcattggcgctcaattgtgaacaagtccatgtgatggcaggcgtcgtgcccgctggcgaagatgctgaacggtaccgggcagtatttatcgataatatccgctacgctgccgaccgctttgcgccacacggcaagcgaatattagttgaagcactcagccccggcgttaagcctcattatctcttctccagccagtatcaggcactggctattgttgaagaggttgcgcgagataacgtgtttattcaactagatacttttcatgcgcaaaaagtagatggcaacctgacgcatttaatccgcgactacgccgggaaatatgcgcacgtacaaattgccggactacctgatcgacatgaaccggacgatggagaaatcaactatccgtggctgttccgcctgttcgatgaggtgggatatcagggctggatcggttgtgaatataaacctcgtggcctcaccgaagaagggcttggctggtttgacgcctggcgctaattcgttaaatccctaattacaacgtacccatacatccccccatctacggatggggtaggttaactataactttcagacagggtttcccatgtccacaattacattgttatgcattgcgttagctggcgtaatcatgctgttgctgctggtcatcaaggcaaaggtacaaccattcgttgctttgctcctcgtcagcctgttagtcgcacttgcggcaggtataccggcgggcgaagtgggtaaagtgatgatcgccgggatgggcggtgtgcttggttccgtcactattattattggtctgggcgctatgctggggcgtatgatcgaacactctggtggtgcagagagtctggctaattatttcagtcgcaagttaggtgacaaacgaactatcgctgcgctgactctggcagcgttcttcctcggtattcccgtcttctttgatgtcggctttattattcttgcgccaatcatttacggttttgccaaggttgccaaaataagcccactcaaatttggcctgcctgtcgctgggatcatgctcactgttcacgtggcggtaccgccgcatccaggccctgtcgccgcagcggggttactccacgcagacatcggctggctaaccatcatcggtattgcgatttctattcccgtaggggttgttggctactttgcagcgaaaataatcaataagcgccaatatgcgatgagtgtagaagtactggaacagatgcaactggctccggccagtgaggaaggcgcgacaaaattaagcgataaaataaatccaccgggcgtcgcgctggtcaccagcctaattgttattcctatcgcgattatcatggcgggtacggtttccgcaacactgatgccgcctagccatcccctgcttggtacgctacagctgatcggcagtccaatggtagctctaatgattgcgctggtgctggcattctggttattggctttacgtcgcggctggagcttacaacacaccagcgacattatgggcagtgcgcttcctactgcggcggtagtgattttggttactggtgctggaggggtatttggcaaagtgctggtggaaagcggcgtcggcaaagcccttgccaacatgctacaaatgattgacctgcctctgttaccagccgcatttattattagtctggcgctgcgtgcaagccaggggagtgcaaccgtagcaatactgacaaccggcgggttactcagtgaagcggtgatgggattgaatccgattcagtgcgtattggtgacgctggcagcctgctttggtgggcttggtgcgagtcatattaatgacagtgggttctggattgtgaccaaatatctggggttgagcgtagcagacggtctgaaaacctggacagtgttaacgaccattctcggttttaccggattcttaattacctggtgcgtatgggcggtaatttgaccttaataaaaaggtccgatgggcatcggaccttttattgtgcacagaaaaggccagcctcgcttgagactggcctttctgacagatgcttacttactcgcggaacagcgcttcgatattcagcccctgcgtttgcaggatttcgcgcaaacggcgcaggccttcaacctgaatctggcgaacacgttcacgggtgaggccaatttcacgacctacatcttccagtgttgccgcttcgtaccccagcaaaccgaatcgacgtgccagcacttcacgctgtttggcgttcagctcgaacagccatttgacgatgctctgcttcatatcgtcatcttgcgtggtatcttccggaccgttctctttttcatcggccaggatgtccagcaacgctttttcggaatcaccacccagcggggtgtctacgctggtaatgcgctcgttaagacgaagcatacggctgacgtcatcaactggcttatccagttgctctgcgatctcttccgcacttggttcatggtccagcttatgggacaactcacgtgcggttcgcaggtaaacgttcagctcctttacgatgtgaatcggcaaacgaatagtacgggtttggttcataatcgcccgttcaatcgtctggcgaatccaccaggttgcgtatgtactgaagcggaaaccacgttccgggtcaaacttctctaccgcgcggatcagccccaggttgccctcttcgataaggtccagcaacgccagaccacgattgccataacggcgggcaatttttaccaccagacgcaagttactctcgatcatccggcggcgagaggcgacatctccacgcagtgcgcgacgcgcaaaataaacttcttcttcggccgttaacagtggactataaccaatctcaccaaggtaaagctgagtcgcgtccaacacacgctgtgtggctccctggcttaacagttcctcttcggccaaatcgttatcactgggttcctgttctactaaggccttttcgtcaaaaacctcaactccgttctcatcaaattccgcatcttcatttaaatcatgaactttcagcgtattctgactcataaggtggctcctacccgtgatcccttgacggaacattcaagcaaaagcctggttccgccgatttatcgctgcggcaaataacgcagcgggtttacggatttccccttgtaacgaatttcaaaatgcaagcgtgtactactggttccggtgctacccatggtcgctattttttgccccgccttaacttcttgttgttcccggaccagcattgtgtcgttatgggcgtaggcactcaggtaatcatcattatgtttgatgataatcagattaccgtagccgcgcagcgcgttaccagcataaacaacgcggccatctgcggtcgcgataattgcctgtcctttgctgcctgcgatatcaatccccttgttgcccccctcagaagcgccaaaggtttcgatcactttgccctcagtcggccagcgccaggtggagataggcgtactggtacttgtactgctgacagtcggctcggttgtgcttgctgttggtaccgttacaggcgctgtgaccgtggtcgcagttggcttgttgttcggcaacattttgttagcactctgttcaccgctagactcagaatacgtaattgtcggttggctcgcaacagcaacggtggaattttgtgcaggcttgatcacaactccttgctctgctgcgtcggcctgggtaatggcatttccgccagtgattggcgtaccggaagcattacccacctgcaaggtctgaccaacgttcagcgcgtatggtgcctgaatattgttgcgctgagcaaggtcacggaaatcgttgccagtaatccaggcgatatagaaaagtgtgtcgccttttttcacggtataggtactgccgctataactgcctttcggaatgttcccatactgacggttatagacgatgcgtccgttttccatctgtaccggctgctgagctactggctgcactggctggatttgcggttgttgagtagcctgaatttgtggctgctgcaccggctgaatttgcggttgctgcgctgtagacgtcgtccccattttcggcggcggcgtaatcaacataccagaattagtatttgcaggcgcattgccattaacggagctgaccggtgccggtggattactagtgtcagaacagcctgccagccataggctaaccagactcaaagccgcaatgcggcgaacggtgaattttgggcttcccgcgctcatttatcccccaggaaaaattggttaataaccagtgacataattaccgtgcaaggcaccctactgaacactggaaaagatgttcacgatacgctgacctgcggcaaaataaccaggaaaaatccaggtatttcctcacgttttaagccagctcacccttcactaaagggacaaagcgcacggcctccacggtatcgataataaattcgcctccccgacgacgcacccgtttcaaatactggtgctcctcccctacgggtaagacgagaatcccgccttcgtccagctgcgtcattagcgcagttggaatttccggcggtgccgccgtaacaatgatagcgtcaaacggcgcacgtgcctgccaaccttgccatccatcgccatgacgggtactaacattatgtaaatcaagatttttcaggcggcgacgtgcctgccactgcaagcctttaatccgttcaacgctgcaaacatgctggacaagatgcgccaggattgccgtttgatatccgctaccggtgccaatttccagcacccggctctgcggcgtcagctcgagtaattcggtcattcgcgccaccatatatggctggctaattgtctgcccctgacctatcggcaaagcgatattgtcccaggctttttgttcaaacgcttcatcaacgaatttttcacgcggcacggcggcaagtgcattcagcacctgctcatcctgaataccttgcgcacgtaattgatccagaagtgcttgtacgcgtctgcttaccattgcgtgccaactcccacgctgtttaaccagtcactaaccacatcttgcgcgctatgcgcagttaaatccacatgcagcggcgtgatggagacatagccctcatctaccgcagcaaaatcggtccccggaccagcatcacatttaccgcccggcgggccaatccagtacagcgtattgccgcgcggatcttgctgcgggatcacctgatctgccggatgtcgtgtaccgcagcgcgtcacgcgaatacctttgatttgatccaagggtaaatccggaacgttaatattaagaatacgcccggtgcgcagcggctctttacacagtgcgcgcaaaatactacaggttaccgccgcggcagtgtcgtaatgtttatgcccgtcaaggctgacggcaagcgccggaaaacctaaatgacggccttccatcgcggcggctaccgtaccggaataaataacatcatcccccagattcggcccggcgttaattccggacacaacaatgtccgggcgcggacgcatcagagcattcacgccaagatagacgcaatcggtcggggttcccatttgcacagcaatatcaccattttcaaaggtaaacgtgcgcagggaggattccagtgtcagagaattactagcgccgctgcggttacgatcgggggcgaccacctgaacgtcagcaaactcacgcaaggctttcgccagcgtttgtataccgggtgcatgtaccccgtcatcattactcagcaatatgcgcataatcacctgttgtgttgataagttccctgacaacgctggttgcaaaactacccgccggaagccagaaacggatctctacggtgacgtcatcccaccaattccagcttaattgttgcggatacagcagcatcgctctgcgcgcggcttcaactttttcgcgcaccagtaaagcttgtaattcagtttctgcggcgacagctgcttgttcgaatgccagcgcttcacgctgagttccccattcgccactgcctggcaatgcggcggttatcatcaactctttatcgttgacgcgacgctgtaattccgccagttcttcggtggttgcgacaaaccagctaccacgtccggctaattgtagcgcatcgccgtcaacaacttgattaacgtctgcttttttgaggcgctcagcaacaatctgattaaacaacgcactgcgggctgcgctcaaccaaaaactccgtttattgcgatcgcgcaccggagtattggtttgcgcccagcgctgcgccccctgcaagttgctaccgccaatcccaaaacgttgggcaccgaagtagttcggtacaccttttacgcaaatatcgatcagacgttgttcaacgtcatcgcgattgctcacttcgcgcagaaccagggtaaaggcgttacctttcagcgcgcctaaacgcagcttgcgcttgtgccgcgcatactccagcacctggcagccttccagttgaaaggcgctcagatcgggcatttccttgcccggcacgcgagcgcataaccactgttccgtaacagcatgtttgtctttttgcccagcgaagctgacttcacgggcatgaattttcaggaatttcgccagtgcatccgccacaaaacgggtattgcagccgtttttgaggattctaaccagaatatgctcaccttcaccatcaggctcaaagcccaaatcttccaccaccacaaagtcttccggattggctttcagcagcccggtgccttgcggtttaccgtggaggtaagtgagattatcaaactcaatcattttgttgccttaatgagtagcgccaccgcttcacaggcaatcccttccccacgtccggtaaatcccagtttttccgtagtagtggctttcacgttaacatcatccatatggcagccgagatcttcggcaataaacacgcgcatttgtggaatgtgcggcaacatcttcggtgcctgagcgatgatagtgacatcgacgttgccaagggtataacccttcgcctgaatacgacgccaggcttcgcgtagcagctcgcggctatcggcacctttaaatgccggatcggtatccgggaacagcttgccgatatcccccagcgccgccgcgccaagcaatgcatcggtcaacgcatggagcgccacgtcgccatcagaatgcgccagcaatcctttttcgtaaggaatgcgtacgccaccaatgataattgggccttcaccgccaaaggcatgtacgtcaaaaccgtgtccaattcgcattatgtattctcctgatggatggttcgggtgaggtaaaactcggccagtgccaaatcttccgggcgcgtgactttaatgttatccgcacggccttcgaccaactgaggatggaatccgcaatattccagcgcgctggcttcgtcggtaatagtcgcgccttcatttagagcgcgcgtcagacagtcatgtaacagctcacgagggaaaaattgcggcgtcagcgcgtgccataagccgttgcgatcaacggtatgagcaatggcatttttgcccggttcggcacgtttcatagtatcgcgcactggtgcggcgaggatcccccccgtgcggctggtttcgctcaacgccaacaatcgcgcgaggtcatcctgatgcaaacaaggacgagcggcgtcatgcaccaatacccactgcgcgtcgccagcggctttcagacctgccagcacggaatcggcacgctcatcaccgccatctacaacggtgatttgcggatgattcgccagaggaagttgtgcaaaacggctatcgccaggacttatggcaatgacgacacgtttcacccggggatgcgccagcagcgcatgcacgctgtgttcaagaatggtttgattaccgatactgagatattgcttaggacattccgtttgcattcgacggccaaatccggccgccggaaccacggcgcaaacatccaaatgagtggttgccatgttaattcccgggctgatttatcgattgttttgccccgcagactgtgcgcgcttgctcgcgtcaggcaccagacgataaaaagtttcgcccggcctggtcatgctgagttcattacgcgcacgctcttcgagcgcctcctggccgccattgagatcgtcaatttcggcaaaaagttgatcgtttcgcgctttaagtttcgcgtttgtagcttgctgtgccgccacatcatcattgacgcgggtatagtcatgtataccgttcttaccgaaccacaggctatactgtagccagaccagaatagccagcaacagcagcgttagtttacccatcctgccccctgaaaaacggcatcatcatcccatgcatccgaagacgactctacatcctctgttggggataccgcgacaacgcgggcaaatgtaccacatttgtccattgttacgtatacccagggcgtgcagaacataatctcattattagttacggtttgaattatgaacagaggagacgggaaagtacaaattagcccagtagccacataaacagtgcgccaaacataatgcctactgtcaccagggtgaaaacaatactgtagcgtagctttccgtccatcaaactatgcagcgcaatccccaccactaccgcgacgggcatcagcgccagaaagaaaggccaggtgtagataaagaagaacagcgtgttagagccataaatcaacatcggcatcgccagcgcaaataaccaggagataaaaccgaccacggcaccaggcagactccatgtggtttcttcatcctcagtaaggctgtcgttatttgttagtgtaatgttatggctattacgcatatttgatcctgttactttgacgaaccgggcatggaaacccggtggtgtctcaggatctgataatatcgttctgtctcaacagatctaataattgctgtaccaaatttgttactaattgttcaccattgagatgaatttctgcgctttcaggcgcttcgtaaacggaatctattcccgtaaagttgcgcagttcaccggcacgcgctttcttatataagcctttgggatcgcgggcttcgcaaatcgccagcggcgtatcgacaaacacttcgataaagcgcccttctcctacgcgttcgcgaaccatctggcgttcggcgcggtgtgggctgataaatgcggtcagcaccaccagtccggcttcaaccatcaaattcgccacttcaccgacgcgacggatattctctttacgatcggcatcgctaaaaccgagatcgctgcataatccgtggcgaacattgtcgccatccagcagatacgtactgacgccgagtttatgtaacgcctcctccagcgccccggcgaccgtacttttaccggacccggagaggccggtaaaccacagcactacaccacgatgaccgtggtgtagctcgcgttgttgcacagtgaccggatggctatgccagacgacgttttcgtcatgcagcgccattatttatcccccagcaaatcgcgcgcgccccagtgcggaaagtggcgacgaaccagagcattcaattccagttcgaatgcactgaattcagatggcgcagcagttgcctggctaactggctcgtgcaccataccggcacccacggtcacattgctcaggcgatcgataaaaatcagcccacccgtcaccggattttgttgataacgatctaacaccagcggctcgtcaaaagtgagatccacgaggccgatcccattcagtggcaggttttcaacttcacgctgggtaaggttattaatatcaacctgatagcgaatgccatcaacacgcgcgcgcgtcttcttaccggcaattttgatgtcgtaactctgccctggagaaagcggctgttccgccatccataccacatccacgctcgcgctctgcaccgccggtaacgcttcgtctgccgccagcagcagatcgccacggctgatgtcgatctcatccgtcagcaccagggtgatcgcttctccggcaaaggcttcttcgcgatcaccatcaaaagtcacgatccgcgcgacgttactttccacaccagagggcagcactttgacacgttgcccgacttccacgcgaccggatgccagcgttccggcgtaaccacgaaaatcgagattcgggcgattaacgtactgcaccgggaagcgcattggctgagcatccaccactcgctggatctccacggtttccagcacttcgagcagtgtcggaccgctgtaccacggcatactttcactttggcttgccacgttgtcgccttccagtgcagagagcggcacaaagcggatatccagattacccggcagctgcccggcaaaggtcaaataatcttcacgaatacgggtgaacgtctcttcactgtaatccaccagatccattttgttgatcgccacgaccagatgtttgatccccaacagtgtggagataaaactgtgacgacgggtttgatcgagcacgcctttacgggcatcgatcagtaagatcgccagttcacatgtgcttgcgccagtcgccatattgcgggtgtactgctcgtgccctggggtgtcggcgataataaatttacgcttctcggtagagaaatagcggtaggccacgtcaatggtgatgccctgttcgcgctcagcttgcaggccgtccaccagcagagccagatccagcttttcgccctgggtgccgtgacgcttactgtcgttatgcaggctactgagctgatcttcgtagatttggcgggtatcgtgcagcagacgaccaatcagagtacttttgccgtcatcgacgctaccacaggtcagaaaacgcagcaggcttttatgttgttgcgcaatcatccaggcttcgacgccgccttcattggcgatttgttgtgcaagtgcggtgttcatcttaaaaatacccctgacgttttttcagctccatagaccccgcctggtcgcggtcaatcacgcggccctgacgttcactggtggtggaaaccagcatctcttcgatgatttccggcagtgtttgtgcattactctccaccgcaccggtcagcggccagcagcccagcgtacggaaacgcaccatccgttttttaatcacttcgcccggttgcaggtcgatacggttgtcatcaatcatcatcaacataccgtcgcgttccagaaccggacgttccgcagcgagatatagcggaacaatgtcgatattttccagccagatgtattgccagatatcctgctcggtccagttagagagcgggaagacgcggatgctttcgcctttgttaatttgcccgttgtagttgtgccacagctccgggcgctgatttttcggatcccagcgatggaagcggtcacggaaagagtaaattcgctctttagcgcgggatttctcttcgtcacggcgcgcaccaccgaaggcggcatcaaaaccgtatttgttcagcgcctgtttcaggccttcagttttcataatatcggtatgtttcgcgctgccgtgcacgaatggattaatccccatcgccacgccttccgggtttttatgcaccagcagttcgcagccgtaggctttagcagtacgatcgcggaactcatacatctcgcggaatttccagccggtatcgacatgcagcaacgggaaaggcagcgtacctggataaaacgccttgcgcgccagatgcagcatgacgctggaatctttaccgatagagtagagcatcaccggattactgaattctgccgccacctcgcgaataatgtggatgctttccgcctccagttgccgcaggtgagtaagtcgtatttgatccataaccgttcctttgcaataccgctattttcttgccatcagatgtttcgactatagggagcgtaagagaacgaatgaaattaccaattagaatgagtagttccttaacggaataacgatttggcaaagctaatatcaaaaagtgcttaaggcaccggatttcgggcgtttaggaagatttgaaattgttttagcgcagcggcagtttcatactatggcggtaaaaaaatttgcatggtatttaaggactcactatgttttccgcattgcgccaccgtaccgctgccctggcgctcggcgtatgctttattctccccgtacacgccagcagtcctaaacctggcgattttgctaatactcaggcacgacatattgctactttctttccgggacgcatgaccggaactcctgcagaaatgttatctgccgattatattcgccaacagtttcagcaaatgggttatcgcagtgatattcggacatttaatagtcggtatatttataccgcccgcgataatcgtaagagctggcataacgtgacgggaagtacggtgattgccgctcatgaaggcaaagcgccgcagcagatcatcattatggcgcatctggatacttacgccccgctgagcgatgctgacgccgatgccaatctcggcgggctgacgttacaaggaatggatgataacgccgcaggtttaggtgtcatgctggaattggcagaacgcctgaaaaatacgcctaccgagtatggtattcgatttgtggcgaccagcggcgaagaggaagggaaattaggcgctgagaatttactcaagcggatgagtgacaccgaaaagaaaaatacgctgctggtgattaatctcgataacttaattgttggcgataaattgtatttcaacagcggtgtaaaaacccctgaggcagtaaggaaattaacgcgcgacagggcgctggcaattgcgcgcagtcacggaatagccgcaacgaccaatccgggtttgaataaaaattatccgaaaggcactgggtgttgtaatgacgcagaaatattcgacaaagcgggcattgctgtacttagcgtggaagcgactaactggaatcttgggaataaggatggttatcagcaacgcgcaaaaacacctgccttcccggcgggaaatagctggcatgacgtaagactggataatcaccaacatattgataaggctcttcctggaagaatagaacgtcgctgccgtgacgttatgcggataatgctacctctggtgaaggagttggcgaaggcgtcttgatgggtttgaaaatgggagctgggagttctaccgcagaggcgggggaactccaagtgatatccatcatcgcatccagtgcgcccggtttatccccgctgatgcggggaacaccagcgtcaggcgtgaaatctcaccgtcgttgccggtttatccctgctggcgcggggaactctcggttcaggcgttgcaaacctggctaccgggcggtttatccccgctaacgcggggaactcgtagtccatcattccacctatgtctgaactcccggtttatccccgctggcgcggggaactcccgggggataatgtttacggtcatgcgccccccggtttatccccgctggcgcggggaactctgcgtgagcgtatcgccgcgcgtctgcgaaagcggtttatccccgctggcgcggggaactctctaaaagtatacatttgttcttaaagcattttttcccataaaaacaacccaccaaccttaatgtaacatttccttattattaaagatcagctaattctttgttttcaaacaggtaaaaaagacaccaaccttaaaccatccaaatctaccggggtacgcctgtttaacccaaatgtctggaactcaaatcccgtttccgtattcgttgcccatgccatcactacattgccttcttccgccagtccagctatttgttcccagatcatttcacgaatttttgcggatacatcacctacatatacccctgcacgtacctccaacaaccagatggctaatctgcctcgtaagcgcggaggtacattttcagtgaccacgaccaacatactcatttcagctactccgatggcctgcatctcccagactaacaggaagcggaatggcaacaggctgtgcatcttcaggtggggccggcggttgtatttctccagcggcaagcacgtcctctataagcggaatcaatttggctaatgttttactactgcgaaaaatatccctgcacgccaaacggacttcccggtccggctcaccagggttacgacgcgctatctcaaaagctttcggtacaacagtgtcaaatttaatgatgtctgcaatatcgtaaacaaaggaaagaggctttcctgtatgcacaaacccaatagctggtgcataaccagctgcaagtatcgccgcttcagttacgccgtataaacaggaagttgcagcgctaatgcattggttgatcgtatcgcccttttcccagtctttcggatcgtagcgacgtccattccatgtcacgccgtattgcttcgccagaagtgcgtaggttgcccgcacgcgactgccttctatacctctgagttgctctacggagcgccgggcaggcgcaggttctccaaaccgaagttcaaacattttacgtacgaccttcagacgcaaatcttcatccagagcaagttttgcctgatagagcagcttatcactacgcgcacctccaggctgaccagaagcataaacacgaacgcccgcttcccccacccataccaacaatgttccaacttgcgcagccaggcgtacagctgcatggctaacccgtgtaccaggttccagcatgatgcaggcaacgctgccaacaggaatatgagtgcggatccctgtcttgtcgataagtacaaacgcgccatctattacatcgatctgcccatattgcagaaagatcatggagacgcgatctttgagtggaatgggattaaggggaagccaggtcattttattacacctcaatcacagtggagccaaagatagcaagccacatcccatgcttttagctggcccaataccttgctgtacaagatctattaacgctggcgcgtcgttgatggtgagcacaccttcaaagcaaaccgtttggatctttccacttttaccatcaccagaaaaatactgtggccgttcgcttatgggatgcacatcttcaacgcgcgccgcattgcccaatttacgttgcaaccacgcgatttgttctgcttcttttattaacggaacccgacagcgtttaatattccctttactgtccaggcgcttttgattgtcgagaatagttttgatcggatttgcccgaagccgaaaatagagtggaacaccaacctgaagttgaaattcaacctgtttagttttaatgactgtcgcaacggcagtactaacaggcatttgcgcactctgcaataaaacatgacagccttctggtgtgtttcgcttctcaacatgaaaaagaaaatcacgagcagcatccggtctgtttggaaataaatgccataatccctggtgaagttggtaaagatccctgctccaggccctggcaatgatgactttactgagatacatccatacctcctttaatcacataccattctcgggaagcaaattgtcgaggcaaggtgatcatcggttcgtcgcgcgccgtaaattttaaatgatgccctgtaacactttcctcactatatatatcgccgccaacgggctcataatttaatagcgccttctgaggatcgcttgcctgacatgtccccaaaaaaagcgggtgtgttagtgggcaacttctccgccccaggtaaggtgtataccgaggctttaatactgctttttcaagttcactgataaccatcgttgcatggggtgttaaccagagagcgacggtaaaggaggcatcacataaatattcgcgccatgtttgaatcgtttcatgacttttcaaaccacggtaatcttctcgcgctccaaggactgtatggtaatcacgcaaccccgttacagacacacgacgatcgtcaagaatgagttcatcgcagcgcactgcaaattgcacactctcacttaacgcctgtaaactagaagtatcatcacgttggatcccaagacaagccccgagtagccctaataacccgcttcgggtcggaaatcttccggtaggtcgcgttccttcaaaggtcggctgcccccaggcttgcattggcccagcaagccgcaagatcaaataagatctcatgttcacgcctcgccattattacgaacccaggattttaactgttctaaagtaggcatttgtttaacttgagcagtaattgggtctacatcagataagctgaattgcgcagcagctccgttcagaccatatccattggcaacgcgatcccaatattgattaaacgcctgtatagacggttgcaaaaagccatctttcgctttaaccgctttttcaaaagcatttgccatagaaagtggcatatcggagaaattaaccattaccatatccgcagggttaaaagcggcataagtacgctgttttgctccagggacctctgttgccagcatatgaacaacatgggttgcaatttccagagcctgctccctggaggcaccacctaaattttcctgaagttgagcgaggttaatgttggcataacgataaaaaacaccgctactaaattcctgagttcccagatgtgcagaaccttgttcctgtaaatcatctacagcggtgaaccagtcaatatcagaatcaacctgatgagtagtgatcgcatgcgcaatggacattgcaccatcaacttttcccaactcagtcatcatgccgctggttgccattcttccactaagcgcaatatcaacaccctgctgtaaattcacacgtatggcggcaatatcttccttaagaactttgagcagctttttatcatccagattatcagcctctgcttttgcaacctgctcacagaaccaggctatttctcccacaacccagggagtaaccgcatcggcagaaatcttttcggcttcatcaacacttttaccggagagcagcgctaatgtcttatcgatgattttttggtcaaaacgttcaccaagtttttgccgaagaacatcacgtaattgtgcaagatgaatggttctgagactggattcaccaatattttgtgcgtaataaccacttttacgcatcgcacgtttaaggctttgactactaattcttactcgtcttttgccgccgaaaatagcgtctttctgcatgttcatatcgtcgcggttcagacaactagggctgtgagagatcagaacatgaatattgataaagttagacatagaaaggtttccttacgcatttttgtttgtggtcaatacaaaatcttccagaagttgctggcgttcgcgctttccccaccaggtcaacatcctggccattaatggccagtcaagtacgggttcggcgtgagtaagtaatcgacgtaactggaccatatcggctgttctgtcagcccgaattaattgaaagatacggcgctcgttaattcttccactattggctaaagctcttcccaagctgatacctgttgtttgctcgctttttttgtcctgatgtcggatgacattctttcctgcgctcaggcaaaacaccatgcgcaaaagagcctgctggtgacgtgggttttcccaaccaaaaggttgcaccagcctataaaacgcagggatatcgcgtaattcatcaggttcactaacacgtctaatttgcgcacaacttccattatccagttgttgccaggctcgatataaagccattgcatcaatttcatcagccattacttggccctccttgcggttttaactcccgtaaatgtttgtatagcgtggcgcgggcaagcgctaatgtgcttattaatttaggatgatgtgcatagggagctacagattgattaaatagcatttcacacaattgatgaagtttgtctcgtaaatcagctattacctcatcagcctgggaaaaattaacattcgccagtacatcgggaattaataattcactctgtcgatagaaatgcctttctgcagtctcatgaacagagactccggcccctttgaagtctttatttttaaacccttctgcaaaggtatataacgccttgcgtaaggctgttttatatcccaaaccaacagtcactatttcgtttatcacattgccgtattgttgccacccctgattaaacatcaacacatcatgacgccgttcaagaatagatgcttgattattacgatatccccccataatcaattcaagaggactttgcggcgcaatatttctgaattgattcacaaccgccgccacgcgatttccattttcattttgaataatcttatctaccacaactcggctgatttgtgtccaacttggtgcggaggtggtgaaagcaagaaatttttcctcaacctcccctttcttgactgttaccagacaaggggaatgcggatggggccatagcccattaactgtaaaggtaaatttttccttaagaaaaccggtataacgcaaattgctttcctgtccacagcaagaacatttaccaatcccaatgggatcgcataattcaatatgcgctggttgccagaatagaccacggacaaacccaatactgctagcaggtatagactcattggacttgataggtttaatccaggtaggttggttttccgtatgactttcattaggaaattgtttttgaagacgaggtaatgtgaggacattgagtaacaccgtactacgaagatcgatcccacgtacgaacgttgttacaggtgttcctccacgtaaaccgcttttaaaaccaccaccaaaacctggtgcctgattcgcctggttgaataacgcaatcgcagtgcatccaccacataatgcttcaccctgccccggttgattgacaaatgcacaattcgtcgcgccgcttaccccagccaacagtttttccattggagtcacatcatttgctttgacacctttggtctgcataaagggatgttctgcgtgattaaggtagaacatatctatccacggcgcgatgagttgttgaaactcatcttcagtgagcggattcattatgcgatgtcgaaattcaacgtcatcttttgccggggcgataatttgcccaatgcaaaccagcagtgctaaagcggccagttccatatcgtcacggggcaaacttaatcgccactgatctctactgcagtataggctttgcagatttatgatttggactttccccccgtttcgcgggcgtacagggatccagttatcaataagcaaattcatttgttctccttcatatgctccgacatttctcctgcatttctatacgtcggcacacttccgttatcggtaaaaacaaagaaaaaatacggcgtaattaattcaataatcacattcactgcaaaaatatattcattggtttaatacaattaacctatacatatattaagatgtgttgaattgtttaaagacaataatgcatgcatttcaaatctgcaagttattcgttttattattaaagaaacttttagttataataattaccatgaattttattacataaaatattcatactgtgaatataaaatctcataccgggaaattaaaagaagatgtacattgtgcaccttccctacttaagtagggataaaccgttattggtcttattatcgtcattgataacaatcattcccgaagttatttgggatttgcagggatgactctggtcatcccttcatcccctgtataggtaataacaatactgttaccctgccagacccatccatccagattctgtttcccttccagccaaagtaacccatcttcatctactacttcagaaaaactacgtttccaggtgaagggtacattgacgcgattaagtgcaagcgcctcatactgctgttcatgacttaggtcctcgtagacctggccatcgagcagttgtttaccactagacgtttgtacataaggcaataatggcaggctcatttccccatccctcgttaccgcaagaatggtttcatcgttatcctgcaagctatattcttcagcccactgcaggaccttgcgagccttgaaccttttttcacactcggcgctttcaaatttatccatgccattgccgacccattctggctcatccatttccgcatcatcgtaaatgctatccagccattgccggtaagcatcagggaaaaataaggatgctccattaagctcctcaatatgttgctgcgtccgccacatgactctaacgttgctataaatatgctcatgtcgtccgtaaccctcgccatcaggcagcaaaatggtggcaacaggaatctcaaaaccagcgggacgatatttgcgatgatggcgatgtaaacggcccaatcgttggaaaagcaaatctgcaggacaatgctgagtaattaaccaatcaaaatcaacgtcgagactttgttccacgacctgggttgcgacaagtatccgtccaacatttcgcttcccatttttgccgaaattgctaataactcgattctctttttcacgacgatcgttcagcgtaaagcgcgcatgaaacaaatctatatctacttgcgtgttatttagctcctttagccgttggtagcatacttgtgcaacgtcaaccaaattgcaaataagacagacctgtgcacccgcgtttgccgctgcgatcattcgctctaacatcgtaaggtcaggtaacatgtcagctaaacaaataggttctggctgaatgctaaagcggggcgggagttgttctggatgagctagcagatcaaaacgttgcgcaccattcacacctcgccagttaatgagtggatatgcggagttattttccactggatctgtatgcagaccataagtatccagaagtttctgtttttgtttcattggtagggttgcggaaagaagaataacactccctcccacatcagcctgagccttgagcactgcctccagcaagccgttcatataggtgtcgtaagcatgaacttcatcaacaattaaaacacttcgaccaattcccaaaccacggataaagcggtgtttaactggcaatacgcttatcaacacctgatcaatcgtgcaaacgccgatttgcccaagaaacactttcttattgctttgactcaaccactgacaacactgaacccacgcttcttcttgcccctgttcagtaatcgcgcgactttttatactttgaaagaggtggttaaaccgactattgccatgagcaagaataagatttggggaactaaataagtggctcgcgctcgcttccattctcgtaagcatagcattcgcggtagcttgtgttgggagggcaaaaataacactatccgcaatttgttgatcaataagtttccaagcataggccagcgctgtttccgttttaccggagcctgtaggtgcctctattaccgtcagcccgggagctactggaagagcatcaactaacacctgtaattgtctgggttgatagccattgtccagtagtgcatgaacaccttcataacatcgcttattacttacaagtccactcaactccaatacccggctcgcatcctgctgtcggtcctggaaatacgttctcagagcatttatgtcggaaggcgcatcctcattaaacagaaaggtattcgttgtagtccaggagcctaaccagtcagcaaggctgcaaaaacctgctaacagactactacaatcaggtggtatatcgtttatagataaccccgctggcgttaaaaataatgcttccagtacagatatccactcctcacgagcctgtttatcttgcgcagcataagatgccagagaagctggcatttcccaacggctcttatcttgatcctgggaatgtaatataaaaccatgatgtcctgtaacggcctctacccatggaaaccaggactcataaggatgaggagcggcatcaaaaaaactgaaaaaatccccgagagattgctcactaagactatcctggttaaaccaatacagaccggctgcaccatgattaaatttacggcacatttgtgtacttggaccattaagacttggcgttgcaggatttaatttcagccaactttctgcacttttatattggaatcgtatatcaaactttccaatatcatgaagagcaatgaaaaataacagccaggccttcaccctctgtttacttagcatttcatttcggcaaaaagtattttgcagtacgacactttgatcccaccagcaatctgcaacagcagcaacatcaaggcaatgataaattaacagatgaatatcatttcctttcgtcaagcttttactggattttccccagtaatggcatatatatttaaaaggttccattaatagcctccctgtttttttagtattatcgatgatatcagcgggctatttttcgatgctgctcataaatatcgaattacagtgatatacacatgtcttgcctccctgcaaagaagagactaacattcgaattgtttgggttcgaacgctggcctcaggttgatagaaatatcgcctggggcttttgtccatctggaacctcgcgaatgcttaacgccagacagcctcaagcacccgacgccattctatacctgataattcttcccgcggcgttcacgtttaaaatcaggaatgctgctcgcaaaataaaaacgcccccatcatttctgacagaggcgtttaatttgtccggcaatatttacccttcgtgtaacccacattccctttttaagccaaagaaacgcgtttcttcttccgccatgccgggttcccatttacgggttgtatgggtatcgcccacgcttaaatatccttcatcccataatgggtgatatttcaggccatgtttttgcaggtactgataaatagttcggttatcccagtcgataatcggcagcactttaaatacgccacgctgaattgccagcaccggtaaattggcacgactgccggattgttcacggcgcaggccagcaaaccaggtttgcgcattcagttctttcagagcccggttcatcggttcgactttgttgatgtcattgtacttttcaatgccttcaacgccctgctcccacagttttccgtagcgtgcttcctgccaggctgcgctttcggtagcacggtacactttcaggttgagcttgagtttgtccgttaactcgtcaataaagcggtaggtttccgggaacaagtaacccgtatcggtgaggatcaccggaatatccgggcgaatttgattcaccagatgcaggctcaccgccgcctgaatgccaaagctggaagaaagtacatattcaccgggcagattatccagcgcccaggctacgcggccttcagcgtccagtttttccagttcggcgttagtttccgccagcgccagaatgcgatctaccttcggcagttcgttcagggcgtttagatcgagtttggacatagattcctcactgtttgccttgcctgatgcgacgctcacgcgttcttatcaggcctacaagaccgggctgatggttaatcccacaaatcacgcgccggatcgagcaccgggcgaatgatgcccgcacgcaccgtaaagtcgccgaagccttcacccgcttcgcgctctttcgcccagcgccctatcagttcatcaaggctcgccaggatttccggctcggtgatgttttctttatacatccgtgggatacgtgtcccaatgcggttgccgccaagatgcaggttgtagcgacccggcgctttacccaccaggcccacttccgccagcatcgcgcgaccacaaccgttcgggcagcctgttacacgcatcacgatatgctcatcgctgacaccatgtttcgccattaaattatcgatgttgtcgataaaagacggcaggaaacgctctgcttccgccatcgccagcgggcaagtcgggaaactcacgcaagccatgctgttttcacgctgcggcgtgacggcattcattaacccgctctctttggcgatcttctcgatcttcgctttctcgctttccggtacaccggcgatgatcagattctggttcgccgtaatgcggaaatcgcctttgtggatcttcgcgatctccagcaggccggttttcagcggacgcgccggataatcaaggatgcgaccattttcgataaacagcgtcaggtgccagttatcatcaatgcccttaacccagccaatacgatcgcctcgtccggtgaactcatatggacggatcggttcaaatttgatccccgcgcgacgctccacttccgctttaaacgtctcaacccccacgcgctccagcgtgtatttggttttggcatttttacgatcggttcggttaccccagtcacgctgagttgtcacgacggcttcggccaccgccagcgtatgctccagcggcagatagccaaactcactcgcggtgcgggcgtaggttttcttgttgccgtgttcgatggaaagcccaccgcccaccaacaggttaaagcccaccagcttgccgttttcggcgatcgccacgaagttcatgtcgttggcgtgcagatcgatatcgttctgtggcgggatcactaccgtggttttgaatttacgcggcaggtaggtctggccgaggatcggttcttcatcagtagtggcgactttttcctggtcgagccagatctccgcatacgcgcgggtacgaggcaacagatgctcagaaatcttcttcgcccactcgtacgcttccgcgtgcagctggctctcgtaagggttgctggtgcagagtacgttacggttcatgtcgttagctgtcgccagcgcatcaagaccgacgctgtgcagcatctggtgcaccggtttgacgttctttttcagaatgccgtggaactgaaacgtctggcggttggtcaggcgaatgctgccatagatggtgttttcaccggcaaatttgtcgatcgcctgccactgtttagtggtaatcaccccacccggcagacgacagcgaagcagcatcgcgtggcgcggctccagcttctgttcagcacgttcggcgcggatgtcgcggtcatcctgctgatacatgccgtggaagcgaatcagcaggaagttgtcgcccttaaagccgccggtcagaccgtcgtttaaatcttccgcaatggtgccgcgcaggtagttgctttcatgcttcatgcgctcggcgtctgtcagttttccttcgaccactaaaggccctggatgtttttcgctcattagtagacatctcgctgataacggcgctctacgcgcagctcacttaaaaattcatccgccgcttcggtgtccatgccaccaaattcggcaatcacttccagaagtgcctgctcaacgtctttcgccatgcgattagcgtcgccgcagacataaatgtgggcaccatcattgatccagcgccacagctccgcgccctgttcgcgcagtttgtcttgtacgtaaactttttctttttgatcgcggctccaggcaagatcgatacgtgtcagcacgccatctttgacgtagcgctgccactccacctggtacaggaagtcttccgtaaagtgcggattaccaaagaacagccagtttttacctggcgcttcgtcggcggcgcgttgctgcataaaggcgcggaacggcgcaataccggtgcctgggccaatcataatcaccggggtttctggattggctggcaggcggaagttatcgttatgttcgataaatacgcggacttcgccctcttcttccacgcggtcagcgaggaagctggaggcaccaccggcacgggcgcggccttccacgtcgtaacgcaccacaccaacggtgacgtgtacttcgttctcgacttccgcctggctggaggcgatggaatacagacgcggcgtcagcgggcgcagcagattaattagcgcttcggcatcaagctgtgccggggagaaacgcaccatgtcaacaatcggcgtcgtcgcggcgtaatgctgtaacttcgctttatcgcccaccagcggcagcagtgtttcactgcgggtaagcgtggcgtaattctcaacaatgttggcggtgttgacggtcagttcgaagtgccactgtagcgcttcgttcagaggcaacgttttgccctcgacggtgacaggttcatcgcctttcagccacagcagttcgacaagttctttcaccagtgccggatcgttctgataccagacgcccagcgcgtcacccggctggtaacgcatgccgctgtcacctaagtcaatttcgatatggcgaacgtctttttcagagttacgcccggtaattttctggttaacagagaggctagccaccagcggcgcgtctttgctgtacgggctggtgtggatttcatttaccgcgccagtagcgacggattggctaggtgccgcgacaggcgcacggcttttaagcgcatcaaccacgcgggcgcgccactcgctggcagcagcctggtattcaacatcggcatcgacacggtcgagcaggcgttcaccacccagttccgccagcttgctgtcgaaatctttcccggactggcagaaaaattcataagagctatcgccgaggctaaacacggcaaacgcggtgttttccagctttggcgcttttttggagaacaggaacttatgcagcgcgacggcttcttccggcggttccccttccccttgcgtactcgtcactacgatgagcagtttttcgctggcgatttgtttgaatttatagtcgcccgcgttcaccagcttaacgttcagttttgctgctaataaatcatcacgtaatgcttcagcaacccggcgcgcattgccggtttggctggcggagataatagttatacccggcatttctgcggctggcgctggcgtcgctgcaagcgcagcaggctgctgattgagtacgccccagaaatagccagaaacccaggcaagctgggtgggagttaaatcggtcgtggccgcctgaaggcgtgccagttgctccgggttcaacggaagcaacgcggaaggtgggacctgtgtcgtcatgcgtcgttatgttccagtaagcaaagctgtttctgcgccctgtcagcgcccataaaacagaagagaaggtaaggttaacggggcaaacggtgtggattaaagacgggatagcgataactaataaccaaatcgactaacctgttttagcaatagtctttaacaacaaaatagattaaccaacctaatgaaaaacaaatgaatttagccaatcattaagataaatcagcgattttgcgcaacaaagtcgttttagataatgcgaaaaaacagcctttccggtactctacggcggttttatcgtcctgtagagaaattatgatgtccaccacgttatttaaagatttcaccttcgaagccgctcaccgcttaccacacgtcccggaagggcataaatgtggtcgcctgcacgggcattcctttatggtgcgactggaaattaccggggaagtcgatccgcatacgggctggattatcgatttcgctgaactaaaagcggcgtttaaaccaacctacgagcgcctcgatcaccattatctcaatgatattccaggtctggaaaacccaaccagcgaggttttagcaaaatggatttgggatcaggttaaacccgttgtgccgctgttaagtgcggtgatggtaaaagaaacctgcaccgcaggttgtatctatcgcggcgaatgataagagtgtgtcggcggtcaatttcccttaagtaacgctatgttagggtgttgtgttctggatatctggggcatgacatggaagacgactgcgacattattattattggtgccggtattgcaggcaccgcttgcgcgttacgctgcgcgcgagcgggtttatccgttttgttactggaacgcgctgaaatccccggcagcaaaaatctttccggcgggcggttatatacccatgcactcgcggaactcctcccgcaatttcatctgaccgcgcctcttgaacgacgcatcactcacgaaagcctttccctgttaacgcccgatggcgtaacgacgttttccagcttacagcccggcggtgaatcctggagtgtattacgtgcacgattcgatccgtggctggttgccgaagccgaaaaagaaggtgtcgaatgcatccccggagcgacggtggatgcactgtatgaagaaaacggcagagtctgtggcgttatttgtggtgacgatattctccgcgcccgttatgtggtgctggcagaaggtgccaacagcgtcctggctgaacgtcacgggttagtgactcgtcctgctggcgaagcgatggcgttggggatcaaagaagtgctgagcctggaaacatccgctattgaagaacgttttcatctggagaataacgaaggcgcagcgttgctgttcagcggcaggatctgtgatgacttacccggcggcgcatttctttatactaatcaacaaacgctcagcttagggattgtttgcccgctctcttcccttacgcaaagtcgtgttccggcaagcgagctgctgactcgctttaaagcgcatccggcagtgcgcccgcttatcaaaaacacggaaagtctggagtatggtgcgcatctggtgccagaaggtggcttgcacagtatgccggtgcaatacgccggtaacggctggctgctggtgggcgatgcgttgcgcagttgcgtcaataccggaatttccgtgcgcggcatggatatggcgctgactggcgcgcaggcggcggcacaaacgctgataagcgcctgccagcaccgcgagccgcaaaatctgtttccgctttatcatcacaacgtagagcgcagcctgctgtgggatgttctacagcgttatcagcatgttccggcgcttttgcaacgcccgggatggtaccgtacgtggcctgcgttaatgcaggatatttcccgcgatttatgggatcagggtgataaacctgttccaccgctgcgccagttattctggcatcatttacgtcgtcacggcctgtggcatctggcgggcgatgttatcaggagtctgcgatgtctgtaacgtaagatgttatcaggagtctgcgatgtctgtagcccgtaatctctggcgcgttgctgatgcgccgcacattgttccggctgactccgttgagcgccagacggcagaacggttgattaacgcctgtccggcaggtctttttagcctcacaccggaaggtaacttacgtattgactatcgcagttgcctggagtgtggcacctgccgtttgctgtgcgacgaaagtacactacaacagtggcgctatccgccttccggattcggcatcacctaccgctttggataaataataaggataatttatgcccctcttacacctgctccgccagaatccggtgattgctgccgttaaagataatgccagcctgcaactggcaatcgattctgaatgccaatttatttccgtgttgtacggcaatatctgcaccatcagtaatatcgttaaaaagattaagaacgccgggaaatatgcttttattcatgttgatttgctggaaggcgcgagtaataaagaagtcgttattcagtttttgaaactggtgaccgaggcggacggcattatcagtaccaaagccagtatgttgaaagcggcaagagcggaaggttttttctgtattcatcgcctgtttattgttgatagtattagctttcacaacattgataagcaagttgcgcaaagcaatccggattgtattgagatcctgccaggctgtatgcccaaagtgctgggctgggtgacagagaaaatccgccaaccgctgattgccggtgggctggtgtgcgatgaagaagatgcgcgtaatgcgattaacgcgggtgtcgtggcgctttccaccacgaataccggggtctggacgttagcgaaaaaattactttgacgggataatcgtaaccaattgaatttggtttgatttgtaggccgcacgccacatccgacattcagcgcctgatgcgacgcttgacgcgtcttatcaggcctacaagtccccaggccagaaccgtaggcaggatcatccggcaacacgttattggcaatctgcgtgaatgtttgtcaccagtgcctccagcaccactttccagtcatcaaccacgccaacatctgcctgactaaataccgcagcgctggcgtcatgattaatcgccaccacaaacttgctattgcgtacgcccgccattaacgctgctgcgccagaagcgccaacaacaatacacacctcaggtgccagcagatgtccggaaataccaatcactttttcagcatcaacgccaccgttcatcactcgcgcccgactgtagcccacttcggctcccagcttttctgccagcatagcgatttcctggttatctgcctctccgccctgccccaccaccagcacccgtctggcctcagctaatgggtcgcgggtaacatttttcagatcctctgtgctaaccagccagtccggaagcgcacccgggacaatgttcagttgttgcattccagagggcaacgtggcgtttttcgctgctcccgcctgacgcgccagggaaaggcatagcgggcgtttttctgtttgcagcgtcgccgttagcgcatttccccagtgggatttgcgcacgcttacggttggaatatctaagctagtcacctggcagatgcttgcaccatgtaaacgccaggccagccgggtgctcagttcatcgccaaacgttcccggcggaaagagaacaacgtccgcaggcgttcgctgccactgttccaccaacgcatccagcacctgttccgccactacaggctgaggttcaatctgccagtgcgccagggtacaaccgctgaaatcctgcgccgccagccagcttgctattgcggcattctcctgatttattgtcacaattgcgatattcatggctgcatcctttggcgtaaatagtcctgccatagcttttgagctttttctgctaccgtttgcccatcaatcagcgtcgctccgcgtcgttgctctgctcttgccagttgcagacactgcatcgctggcatttcggcagcaacagttttacggataatttctgctttccccgcagccattcgctggcgcattcccggtactggcaaggccacttcaccgcactgacgcacggcaatcaccgcaggcaagcgaacccggcaacaacgcaacccatgttcagtacgctgttcgagggtgataaacagcgcgtcgagagtgaaacgctccacctgggtgaagcagggccagcccagcatttccgccagcaaaaatggcgtttgcccattctgcccttcgctgctttggcagccggtaattatcagatccagcggattctgatgctgccattcggcaatatggcgagcgacaaattccggcgcaaagcgcagatctgccgccgtctccagcaatacagcttcctcaaacccaagagccatgagatagcgcagccagtgcaatgcccgttcatcccccatgctcaacgcggttaaagacatcggcgtaccgttttttctctgcgccaacagcagcgcggcagcggcctgttcatcagcaccgagtaaacttcgcagtaggctaatatccggtccgcttttaccctgagccgccgcctgccactctttttccgccagcattccggcatccggttcggctttaaacgctaacagaatgttcattcgcacctcctacatttcccgccgccaccagcgggagggctttagtttctggtgcccatagccaggtcacaacaaaaccaaccaacaacactgtcgccaggagcaataaggtgacttgcattccccactgcgccagcacccacggcagcaggccagtacttaccgccgcgccaagtcgactcatggcagtggcaaaaccgacgcccaggctgcgaatgtcagtaggaaaactttccgcaggcaaaatgcccaccagattactgactgcgctaatggtggtgctgaagagaacaaaaagcagcagcgttaaactactgccggaaggcaaacaggccatgactaccagcgttgccgccagcagcaaaaaacttcccagcaaaaatttgcgatgtgccagcaggtgcgtcagaactaatcccagcagcgcgcccacaattaacaacgcattaagcatcaggctggcagtcagcgcatcttccagaccaatagtctgggcgatagttggcagccaggtataaatcacaaaccatgggattacgaggcagacaaagaagacgctgttaaacgccgtgcgccgccagtaacggctagagaacaaggttttgatgtgtttatgggtcgccgttaccacttcatcgcccagtaaaacatggggaccaaaatagcgatgcacgatagcgtgagcttctgcaaaacgcccctggcgcagtagccagcgtggactttctggcgttccccagcgtaataacgtaatcaacaacgcgggcagagctgcgcttgccagtagccagcgccaggcctccgggttttcggaaataaagtgatgtccggcaatacttgccagcacatagcctacggtccacaccacgctgaatgcgcccagcaaaataccgcgatggcggcgcggggaaaattcagccagcaaggtgtgacctacactataatcgcctcccagaccaatgccaatcaaaatgcgcagtccaataagatgctctggcgtggtggcaaaaaattgtaaaaagctagcaagcgtaatcagcaaaaagctgaaggtgaagattttttgccgaccaatatggtcggagatccacccaagaaccaggctgccaaggaacaaaccaaggagcgcgctgccgccgatcattcccgccataaacggcgtcagttgcatggcgggcgtaagctgaataatggcgtaaccaatgacgccgagaacataaccgtcggtcaggtgtgcgccgaaagtgagcgcagcaatgcggcagtgaaaacggttaagcggtaaatcatccattcgcaccggactagtgttcatctttaccccttcattgtccggtaataagaacggcttctcgcctgagaagccgaaaaggcaacgccccgtcatcgcggaacgctgcctgacacattatttttcaatcggatagatagtacccgtattcataatgccattaggatcgaactgctttttcagcccttccagcaacgcccacgcgctgccgtgttccagtttgctccagtgaacgcgatgtttaccgataccgtggtggtgcaccatgctaccgccgaggcgaatggtttcttcacagatgatcttgttgagcggattgtggtacttgtcgatttcctcttccggcttacagtcaacgacgttgtaatcgtagacgaagtacatgttggtgccgttctgatagctatgagaggaatgaccgcccagcatggtgatgtcgtcggcgtgcgggaactcagtacgaatacggttaataacgctttcgtagatttcgtggatgcagctccagcagccggatacttcggtggtaaagcccatgttgccggttttgaggatctgcacacgttcggcagccactttatccggtccccagttcaggttgttaaaccaggtttcgatcagcttgctgtccacgcgctggcattgcgggtagcgggcaacgatttccgcaatcccttcgcccgtcaccttcgcaatgcgagggttaccttcagccataaagatcagcacgcattttccgtcggcaaaatgggtgaagtgttgggtgccatcttcagcgtcatacaaacgagcgatactcggacgatacccttccaccatgatttcacgcaggatgttgaagccggttttcatgtcttccaggatatagccgtagaagaggttgttttccggggtgaatttaaagattttcactgttacttcagtgatatagcacaatgcaccttcgttgccgatgatgatgtgacgaatgtccgggccagccgcgcggcgtggcacgtttttaatgcgtgtgacggtgccatcagccaatactgcttccagaccaacgaccatatcttcgattgcgccgtagagtgtggagaactgcccgatacttcgggttgctaccaggccgcccatctgcgccagcggcttactctgcggagaatgccccgtggtgtaacctttttcacgcaacgcgttttccagcacttccagcggaacaccacattgcgccgtcgcctgcatattctcaatatcaatattaatgatttgattcatggcggagccgtcgagcaccacgctgttttctacaacagtttccagcccaccttcggtggcggaagcaccggtacgcggcacaccgttaattttgtgcgcattcataaaattcagcacacgggatacttgctctgtggaaccgagttttacgaccgctgccggaatcggcaaagtataaatgccatgaatatccggaaatttacgaaaacggtcaatactgtttttctttaatactgtttcatcggtaattacgcgatctgcaccaacaatttcctttagctggtcgacaatcgctgcgcgagataaagacatagtaattccttcctgataataaaaatggaataatcattaataagagaaaacagaaaccaccgttatgggttagcgcactaaataaccgccatcaaccactaataaatgcccgttgacataattgcttgccggacttgcgaggaatacggctgcgcccattaaatcctgagtatcgccccaacggtttgccggaatatgatcaagaacgcgctgattggtttctggattactgcgtgtcgccagcgtaatatctgttgcataatagccaggggcgataccatttacctgaatattatattgacctagttcatcacaataagctttggtgaacccggcaagagcatgtttagtggcagaatatgcaggactccattgtccacctaagtaagagaacaaactacagatattaataattttgccgcttttctgcgggatcataatttttgcagcttcatagcttaactcgaatgcggcggtcaggttcacatcaatcatcggatcccagtcggcacgaccgaagtccagcaccttattcagcttacaaataccggcattgttaaccagaatatcaactgtaccgaaacgctcacagcaagcagcgataatcttctgcggcgcgccttctgcggtgatacccacctgcatgaagtccacctcaacaccctgtttttcaatcatttcctttgtttcgccgttatctttgacgaaactaggaataaagatatttgcgccagctttggccaacgccatggcaaatgcctggcctaaaccgctattcccaccggtaacaattgcggttttacctttcagggagaaaaaatccatactgaacgcattgagagattcgatactcatagttagctccaatttccgtaaggcaaaaaaaaagaaaggtaacttcccccgcgagagggaagttacctttctcattatctctggtaactggagataatttttagcataagggcataactgctaatgtgatcgtaatcacagtgtgatattcgtattgtcaaataattttaaaaagcagaagcgtgattactctcacacaacacctctgctttccatgttatttattatttcaattactagagacctgagaaaagtaatccacctgaaagggcggcttacttttctcttttttttgtctattacaaatgggaatacgatatgcaacacaacagttatcgccgttggataaccctcgcgataattagttttagcggcggcgttagtttcgacctggcttatttacgttatatttatcaaattcccatggcgaaatttatgggattcagcaataccgagataggtttaataatgagtacctttggtattgcggccattattctttatgcccccagcggcgttattgccgataaatttagtcaccgcaaaatgattacttccgcgatgatcattaccggattactgggtctgttaatggcaacgtatccaccgctgtgggtaatgctctgtattcagatcgcctttgcgataacgacgattttaatgctgtggagcgtgagcattaaagctgcaagcttgcttggcgatcatagcgagcaagggaaaattatgggctggatggaagggctgcgcggcgtcggtgtaatgagcctggcggtgtttaccatgtgggtcttttctcgctttgcaccggatgacagcaccagcctgaaaacggtcattatcatctatagtgtggtttacatcttgttggggattctgtgctggttttttgttagcgataacaacaacctgcgcagtgccaataacgaagaaaaacagagtttccagcttagcgacatcctggccgttttgcgtatcagcaccacctggtattgcagcatggtgatttttggcgtcttcaccatctacgccattctgagttactccaccaactatctgaccgaaatgtatggcatgagcctggtggcggcgagctacatggggattgtgatcaacaaaatattccgcgcgctgtgcggcccacttggcggcataatcaccacctacagcaaagtgaaatcccctacccgcgtgatccaaatcctttccgtactcggcctgctgacgttaactgccctgctcgtcacgaactctaacccgcaaagcgtcgcgatggggattggcctgattttactgctgggattcacctgttacgccagtcgcgggctgtactgggcctgccctggcgaagcgagaacaccgtcttacattatgggcaccacggtaggtatttgtagcgtgattggattcctgccggatgtcttcgtttacccaattatcggccactggcaagacaccctgcccgctgcagaagcctaccgcaatatgtggctgatgggcatggcggcgcttggcatggtgattgtctttacctttttgctgttccaaaaaattcgtactgctgatagcgcccccgcaatggctagcagcaagtaagccaggaaaattacaggagaaaaatcatgagcaaaaaatacatcatagggattgatggcggaagtcagagcacaaaagtggtgatgtacgatctggaaggtaacgtggtttgcgaaggcaaaggcttattacagccgatgcacacgccagatgccgatactgcagaacatcctgacgacgatttatgggcaagtttatgttttgccggtcacgatttgatgagtcagtttgccgggaataaagaagatattgtcggtattggtctgggatccatccgttgctgccgtgcgttattgaaagccgatggcacgcctgctgcgccgttgattagctggcaggatgcacgcgttacacgcccttacgaacacactaaccctgacgtggcatatgtcacctcttttagcggttatctgacgcatcgcttaaccggcgagtttaaagacaatatcgccaactattttggtcagtggccggtggattataagagctgggcatggagcgaagatgctgcggtaatggataagtttaatatcccccgtcatatgctgtttgatgtgcaaatgcctggcaccgtcctcggacatatcacaccacaagccgcactggcgacacatttcccggcaggactgccggttgtttgtaccaccagtgataaaccggtagaagctctgggggccggattactggatgatgaaacggcggtaatttctcttggcacttacatcgcattgatgatgaacggcaaagcactgccgaaagatccagtagcgtactggccgattatgtcttctattccgcaaacattgctgtatgaaggttacggtattcgcaaaggcatgtggacggtgagctggctgcgcgacatgctaggcgagagcttaattcaggatgccagggcgcaggatcttagtccggaagatttactcaacaaaaaagcttcttgtgtgccgccaggctgtaatggtctgatgacggtgctggactggctgaccaatccgtgggaaccgtacaaacgcgggattatgatcggctttgattccagcatggattacgcatggatatatcgtagcatactggaaagcgtggcgctgacgctgaagaacaattacgacaatatgtgtaatgaaatgaatcactttgcgaagcatgtgatcattactggcggcggtagcaacagcgatctgtttatgcagatttttgccgacgtgttcaaccttccggcacgacgtaacgccattaacggttgtgcaagcctgggggcagcgattaatacagcggtaggtctggggctatacccggattacgcaacggctgtcgataacatggttcgcgtgaaagatatctttataccgattgagagcaatgccaaacgctacgacgcgatgaataaaggcattttcaaagacctaaccaaacatactgatgtgatcctgaaaaaaagctatgaagtgatgcatggggaattggggaatgtggatagcatccagagctggagcaatgcgtaagtgaggaaggccgggcgggaaactgcccggcctgaacatacctgaatggttatccccgctgacgcggggaacataagttcgacaacttaaaaaatgataacaagtccggtttatccccgctgatgcagggaacataataaaaactttaactagttcggtttatccctgtttttacaaggaatattaactacactcgatgtctttagaataaaagacaatacgaatcgcactttatcaattttcacttaaagtatgaactggatatctttattcataagaactattcatcaacagcgtatagaggcggttatgtaaaaccactcattagcctcaaaacaaagacaaacttccagatttattacttaaccaatgaataacaagcttaaaaaatatactgttattctaaagaaaaaattaacaggcattaattcaatattaaaaaaataatagattaaaatttcttaacgatttaagaatcatacaaataacactttgattaaatttaattttttgtatcgataattgtgaacctctctggcatggagaactattttgaacatgaggtgttacgtggatatgttgcttattacaagtactgctaatataaaaacttgagaaagagataacgggttatatggtggtttatccccgctggcgcggggaactcgacagaacggcctcagtagtctcgtcaggctccggtttatccccgctggcgcggggaacacctgttttcgcaaatctatggactattgctattcggtttatccccgctggcgcggggaacacgggcgcacggaatacaaagccgtgtatctgctcggtttatccccgctggcgcggggaacactggctctgcaacagcagcacccatgaccacgtcggtttatccccgctggcgcggggaacacgaaatgctggtgagcgttaatgccgcaaacacaggtttatccccgctggcgcggggaacacattacgcctttttgcgattgcccggtttttgccggtttatccccgctggcgcggggaacactctaaacataacctattattaattaatgattttttaagccagtcacaatctaccaactttatagtatcacacaaacaacacatccattatgttaaagagcacttaatccattgattaaaaaggtaaatatttaaaataactctatacaaactaaaatctaccaaactttaccgcaataattttcactccagcgaaaaattaatgccacagaatttgtagagaatgctaatgattagccctggatgggtaaaatggaggagttttcagaggcgacaaacaatataaatgagtagaagtctttacaggttccacccatttataacgcttataaatgtttaatcaggcaatatttagatatttatgtgtttgcatgctcaaacgccaattacgcgcaatgcaggtttcaatgcacaaacgtgtggcatcatccttttggctaatcggctgcagtgcaatgactcgcggtttatcatcggtcagcgttgccagtagttcatccagtgcttcaatatcgcgtacgcgccccactggatgcttgatttcgttggctcgctccagtgcctgactcaacacttcatagccgccgcgcatgttcagctttgggcttacggtaacccaggtattcggtgtgcagcgtacctcatgagtaccactggtttcgatctggcagctaaaaccgttcttttcgagcagatcagtcagtggcagcaaatcatgaatgcaaggctcaccacccgtaatcaccacatgccgcgcggtgtatccctggcgaccaatgacagccagcaaatcttcactgctcgcagccccccacttatcactctctttggtcttcgccagaatgctgaaaagggagacttcccgatcctcaagcttttcccaggtgtgtttggtgtcgcaccaggcacagccaaccgggcatccctgtaaacgaataaaaatggcgggaacgccggtaaagtaaccctcaccttgcagggtctggaacatctcgttaatcgggtactgcatagcattctctgtgaagtggataattgttaattattgcagatcctgccacaacaatcatgtcttattaacattctgttacaggcaggtttaaagaaaaatgcgaaacatatcgttaataattaaagggagtaacgtattatgtcagaagaaaataaagaaaatggatttaatcatgtcaaaacattcaccaaaattatatttattttttctgtattagtttttaatgataacgaatataaaattaccgatgccgccgtcaatttatttatccagatttaatgagaaatttataatgcgctatttcatactaatgttcactttcgtatgttcctttgttgcagcccaaccaactattgtcccacaattacagcaacaagttacggatcttacgagtagcttaaacagtcaagaaaagaaagaactgacgcacaagttagaatctattttcaataatacccaagtgcaaattgccgtattaattgttcccacaaccaaagacgagacaattgaacaatatgctacaagagtttttgacaattggcgtttaggagatgccaaacgtaatgatgggatactgatcgttgttgcctggagcgatcgcactgtccgcatccaggtaggttatgggctggaagaaaaggtaaccgatgctctggctggagatatcatccgtagcaacatgatacccgcatttaaacaacaaaaattagctaagggattagagctagctataaacgctttgaataaccaactcactagtcaacaccaatatccgactaatcctagtgaaagtgaaagtgcgtcttccagtgatcattattactttgctattttttgggtatttgcagtgatgttcttccctttctggttttttcatcaaggcagtaatttttgtcgcgcatgtaaaagtggagtctgtattagtgcaatctatcttttagatttattcctgttctccgataaaattttttccattgctgtattttccttcttttttactttcaccatatttatggtctttacctgtttatgtgtacttcagaaaagagcatctggtagaagttatcatagtgacaacagcggttccgctggaggcagtgatagcggcggatttagcggcgggggcggttcttctggaggtggcggcgcatccggccgctggtaactcaaccataaaaaatgccagcccggaggctggcatttttaaatcagataaagtcagtcttatgcctggcctttgatctctttacgaccgttgtacggtgctttttcgcccagagcttcttcgatacgaatcagctggttgtatttagcaacacggtcagaacggctcatagaaccagttttgatctggcctgcagcagtaccaacagccaggtcagcgatggtagcgtcttcagtttcgccagaacggtgagagataactgcagtgtagccagcatctttcgccatcttgattgcagccagagtttcggtcagagaaccgatctggttgaatttgatcaggatggagttagcgatacctttttcgataccttctttcaggatcttggtgttggttacgaacaggtcgtcaccaaccagctggattttgtcgcccagaactttggtctggtatgcgaaaccgtcccagtcagattcgtccagaccgtcttcgatagaaacgatcgggtactgtttggtcagttcttccaggaagtgagtgaattcttcagaggtgaacgctttgttgccttcgccagccagaacgtatttaccatctttgtagaattcagaagctgcgcagtccatcgccaaagtgatgtctttgcccagttcataaccagcagctttaacagcttcagcgataacagccagagcttcagcgttggaacccaggttcggcgcatagccaccttcgtcaccaacagcagtgttcatgcctttcgctttcagaacttttgccaggtgatggaaaacttcagaacccatgcggatggcttctttcacagttttcgcgccaaccggctgaatcatgaattcctggatatcaacgttgttgtcagcgtgctcaccaccgttgatgatgttcatcatcggaaccggcatagagtatttgcccggagtaccgttcagttcagcgatgtgctcgtacagcggcatacctttagcagctgcagcagctttggcgttagccagagatacagccaggattgcgttcgcgccgaatttggatttgttttcggtgccgtccaggtcgatcatgatcttgtcaatgccagcctgatctttagcatctttgccaatcagcgcctgagcgatcgggccgtttaccgcagcaacagctttggttacgcctttacccaggaaacgggatttgtcgccatcgcgcagttccagagcttcacgggaaccagtagaagcaccactcggagcagctgccataccgacgaaaccaccctccagatgtacttcggcttcaacagtcgggttaccacgggagtcgatgatttcacgaccgatgatttttacgattttggacattaggttttcctcaagtcactagttaaactgaaactccagacaaacaacgcgtacccagggtacgcgttgccgctctaacttttttacttacttcgcctgacgtttctggaactcgctggcggctttcacaaagcctgcaaacagcgggtgaccatcacgtggagtagaagtaaactccggatggaactggcaagccacgaaccacgggtgattcggaacttcgatgatctcgaccaactgatcatccccggaacggcccgcaacgcgcagacctgcatcttcaatctgtttcaacagcatgttgttgacttcgtaacggtgacgatgacgctcaacaattgtcggcgcattgtacagctggcgaaccaggctatcgtcaaccaactggcactgctgtgcgccgagacgcatggtaccgccgagatcgctcttctcgctacgaacttcaacgttgccgttttcatcgcgccactcggtaatcagcgccacaaccgggtacttacagtctggcacaaattccgtagagttggcgttctccatgttggcaacatggcgagcgtaatcaattaacgccacctgcatacccaggcaaatgcccagataaggaatattgttctcacgcgcaaaacgcgcggtcgtaatcatgccttctacgccacgatagccgaaaccgccaggtacgaggattgcgtccagacctttaaggatttcaacgccgcgcgtttcaacatcttgactatcgatcagtttgatgttgacgctgacacgattcttcagcccaccgtgtttcagtgcttcgatcacacttttataagcatccggcagttcaatgtacttgccgaccataccgatggtgacttcacttaccgggttcgcttcttcgaagataacctgttcccattcggacagattcgcttccgggcagtttaagctgaatcgtttacaaatataatcgtccagcccctgagatttcaacaggcccggaattttatagatggaatcgacgtctttcagagaaataaccgctttttccggaacattacagaacaatgcaatcttcgcacgttcgttcgccggaacagcgcgatcactacgacaaatcaggatgtcaggctggataccgatggagagcagctcttttacagagtgctgagtcggtttggttttgacttcaccagacgctgccatgtacggcaccagcgtcaggtgcataaacagagtgtgctcacggccaatttcaacagccatctggcgaatcgcttcgaggaacggcaaggattcgatatcacctactgtaccgccgatttctaccagtactacgtcatgaccttcgccaccttccagcacgcgctctttgattgcgttagtgatgtgcggaataacctgcacggttgcgccgaggtagtcaccgcggcgttctttacgcagaacgtcagagtagatacgacccgtggtgaagttgttgcggcggctcattttggtacgaatgaaacgctcgtagtgccccaggtccaggtcggtttcagcgccgtcttcagtaacgaacacttccccgtgttggattgggctcatagtacctggatcgacgttgatgtacggatccagtttcatgatggtcacattgaggccacgggcttcaagaatggctgcgagggaggctgcggcaatgcctttacccagagaggatacgaccccgccggtcacaaaaatatagttcgttgtcatgctgaacctgagaagttaggttgaaaagacgatggaataaccaagacgggaaagcagtatacccgaacatgacctgtgccacaaactttcattatccctcctcttcgccagcgcactattgaaatcaggagtgagaaaatagcccctttggggtaaatgtttttgacgcaaatcaagcgcttgtcatttaaaaaatgacacaaatggcgcttgaccgcgtaattcccttagagatcaatttcctgccgttttacctgttgccagacttcttccattgtttcgaggtcaacacctgtcatttccagtccacgcgcggcaacaatacgctccacttcgcgaaaacgacgctcgaatttttcgttcgctttttgcaatgcgatttctgctttcgtccctaaatggcgagccagattaaccgtggcaaacagcaggtcccccatttcctcctccagtttagcctggtcgacaacagcctgccgcgcttcgtacatcacctcgtcgatctcttcgtagactttatcgactaccggaccaagcgtcgtccaatcgaagccaacgttggcgcaacgtttctggattttttgcgcacgcattaaagccggtaaactacgaggaatatcgtccagcgcgctatgctgcgctttctgcgcgcgctcttcggttttgatttgctcccaacgggcaagcacttcactactgttttcggcagaactatcagcaaaaacatgcggatggcgacgctctaatttatcgctaatagcagcgcaaatatcattaaagtcaaagcgcccttcttcctgagccatttgcgcgtaaaacaccacctggaatagcagatcgcccagttcaccgcgaagatcgtcaaaatcttcacgggcgatggcgtccagcacttcgtaggtttcttcaagggtgtaaggcgcaatggtggcaaatgtctgctctttatcccacgggcagccgttttccggatcgcgcaggcgctgcataatagtgagcaaacggtcgatttgattcattgaattgtcctgaaaattgcgggtctgtcaggtggaaacctgtgaccagaatagaagtgagttagtaacattacccaatcagtacgttaattttggctttaatgagttgtaattcctctggggcaactgttcctttcttcgttgctcctcttgcccgccaggcgatactttttacctgatcagctaacgctacgccatcacgttcctgaccggataaaacaacttcgaacggatatcctttactttgcgttgtacaaggaacacacagacacatacctgttttgttgttgtacatgaaaggactcaggacaacagctggacgatgtccagcttgctcgctaccttttgtcgggtcaaaatcaacccaaatcagatcgcccatatcgggtacgtatcggcttaccattaccagacttccttatctttcggctctccccagtcgatattctcgtggaggttttccggcgtgatgtcgttgaccagttcagcaagcgtaaatacgggctctttacgcactggctcaataattaatttgccatccaccaggtcaatcttcacttcatcatcaatattcagattgagcgcctgcattaacgtagccgggatccgcaccgccggactatttccccaacgctttacgctactgtggatcataaccctttcctcaaaccgctatcatatgtagatacagtatatatcaatctacattgtagatacgagcaaatttcggcttaactcccgtgcaaccgacgcgcgtcgataacatccggcacctggttgagtttacccagcacgcgccccagcacttgcaggttgtaaatctcaatggtcatgtcgatggtcgccagttgctgtttggtgtcgctacggctggcaacgccaagcacgttcaccttctcgttggcgagaatggtcgtgatatcacgtaacaacccactacgatcattagctaccacgcggaccaccaggctatatccggcggagtagctctcaccccataccgcgtcaacaatgcgttctggcgcatgggagcgcagttccgccagttgttcgcaatcggcgcggtgtacactaataccgcgcccctgggtaatgaagccgacaatctcatctccaggaatcggctggcagcagcgcgcgatgtggtgcatcaggttgccaacaccttcgactaccacgcgaccgttatctttactgcggttttgcggcgtgtagcttttttgctgaagttgcttcagcgcggcggcgtcctgctcttcggcactcggcttattaaattggctttgcaggaagttcaccatctgattgagacggatatccccgccaccaatcgccgccagcaactcgtcgacatcattgaagttgtaacgcggcagcagatgtttttctgcttctttcaggctgatccccagatgttccagctcgtcgtcaaggatttgccgcccagccagaatgtttttgtcacggtcctgtttacggaaccaggcgtgaattttgctacgcccacggctggttgtgacgtaaccgaggtttgggtttaaccagtcacggctggggttcggctgtttctgggtgataatttcaatctggtcgcccatctgcagctggtaggtgaacggcacaatgcgcccgccaatttttgccccgatgcagcggtgtccgacatcactgtggatgtggtaagcgaagtccagcggcgtacttcccgcaggcaaatcaacgacatcacctttcggcgtaaagacgtacacccggtcgtcaaagacctgactacgtacttcgtcgagcatttcgccggaatcagccatctcttcctgccacgcaatcagtttacgcagccaggcaatccggtcttcatgtccgctacgtgcgccgccagcagccgcgccctctttatatttccagtgcgcagcaacacccaactctgcatcttcatgcatctgtttggtgcggatttggatctcaacggtttttccacccggccccagaaccacggtatgaatagactgataaccgtttggtttcgggttagcgacgtaatcgtcaaactcatccggcaggtggcgatagtgagtgtgcactatccccagtgcggcatagcaatcctgtaaacgctcggcgacaatacgtaccgcacgcacatcaaacagctcatcaaaggcgaggttctttttctgcattttacgccagatgctgtagatgtgtttcggacgaccatacacttccgctttaacgccttcagctttcatctcagcgcgcagatgaccaacgaactcttcgatgtagtgttcgcggtcgagacgccgttcatgcagcagtttggcaattcgtttgtattcggttggatggaggtaacggaagcagtaatcttccagttcccatttcagttgtccgattccgagacggttagccagcggtgcgtagatgttggtacactcttttgccgccagtacacgttcatcttccggcgcatcttttacttcgcgcagatgagcaatacgctccgccagtttgatgactacgcagcgaaaatcatcgaccatcgccaataacatccggcgaacgttatcgacctgttcggaggaaacagaatcagtgtgcgtcgctttcagctggcggatcgccgccatatcacgcacgccgtgaataaggttaacgacgctcttaccgacgctctcacgcagcacatcttcgctgactacgttggcatccgccagagggaaaagcagcgccgcccgcagcgtgtcaatgtccatacttaatgtgctgaggatctccaccatctcaacaccacgccacaataacagactggcatccggatgcccctgcgtctgttgcagacaatacgcccaggtttcggctaagcactcacagctcttctggctggtaatacccagacttgcgatccatttttccggatcaaattcaccagccttattgatatgtgcacttcttaccgcaaccatcgtcctctcctttagggaccagacctgccgaaatcggcaaatcgcaattatttaacgcggctgaaaagtaccatgctttccagatgtcccgtgtgtgggaacatatccagcatcgccagtcgcgcaatggtatatcctgcttttaataacgcttcgctatcccgagccagcgttgcagggttacaggatacataaactatacgaataggttccagttttataatttgctgcataacacctgcggcacctgctcgcgccgggtccagcaacactttatcgaagccgtttttcgcccacggctgctttgtgacatcttcttcaagattttcgtgataaaacgtcacattctgtaagccattaagacgcgcattctgctggcctttttccaccagcgccggaacaccttctacaccgaccacactggcagcttgtgtcgccaatggcagtgtaaagttgcccataccgcagaacagatccagtacgcgatcttcaggttgcacatccagccattccaacgcacgcgctaccattttttggttcacacccgcattgacctgaataaaatcgcgcgggctaaaagttaagcgcaacccgttactgtcataccagggcatctcaccagagacggtttcgagtatctcactatcgggggcgagatacagatccaggccttcagaatggctaaagcgttccagtttttcgcgatctgcgctacttagcggtgcggtatggcgcaaaatcatcagcgtgccgctggttgcctgtaccagttcaacatgaccaagatggcgcatagcttgtaagctgcccagacatgccctgactttgggcagcaatgcttcaagttggggcgctaaaatggggcattgtttgacgtcgacaatgtcactggagcccgctttgcgaaaccccatctgaagttgctgtgttttcggtaagtagttcagacttaaacgcgcgcgacggcgatagccccagggaacatcggcgatcacttcagagacatcgtgtttcattaatcgggcgagtgccgcacttttgcttcgctgctgtaaatccacgctggcgtgttgttgctgacagccaccgcatacgccaaaatgaggacagcgtggcgtttcgcgttccgggctatcgcttaaccggcgtacgactttagcgcgggcatactgttttttatcttcagtaacagtaacttccgcgttttcctgcggcaataatccggggataaatagcgttttgccgttatgtcgcgccacgccctgaccaaaagagtcgaggtcgttgacactaacggttatgatctgacgcgtcgtcgtgcgtcgttttgcagagtagaattgcgccattggcgagactttctcaatttaacagtgtgaccttaattgtcccataacggaactccatgaccaactacagcctgcgcgcacgcatgatgattctgatcctggcaccgaccgtccttattggtttattgctgagtatctttttcgtcgtgcatcgctataacgacttgcagcgtcaactggaagatgccggtgccagcattattgagccgcttgcagtttctactgaatatggcatgagcctgcaaaatcgcgaatctatcggtcagttaataagcgtactgcatcgtcgccattccgatattgttcgcgcgattagcgtttatgatgaaaataaccgactctttgtcacctccaattttcatcttgatcccagtagtatgcagctcggcagcaacgtgccgtttcctcgccagctcactgtcactcgtgacggcgatattatgatcctccgcacgccgattatttctgagagttactcccccgacgaaagccccagtagcgatgccaaaaatagtcaaaatatgttgggatatattgcgctggagctggatcttaaaagcgttcgcttgcagcaatataaagagatctttatttccagcgtgatgatgctgttttgtatcggtattgcgcttatttttggctggcgcttaatgcgcgatgtaaccggtccgattcgcaacatggtgaataccgtcgaccgcatccgtcgcgggcaactcgacagccgggtggaaggatttatgctcggcgagctggatatgctgaaaaacggtatcaacagcatggcaatgagcctggctgcttatcacgaagagatgcagcacaatatcgaccaggcgacgtccgatctgcgtgaaacgctggagcagatggaaattcagaacgttgagttagatctggcgaaaaagcgcgcccaggaagcggcgcgtattaaatccgagtttctggcaaatatgagtcacgagctgcgtacaccactgaatggtgttattggctttacccgcctgacgctgaaaacagaattaacaccaacgcagcgcgatcacctgaatacgattgaacgtagcgcaaataatttgctggcaattattaatgatgttctcgacttcagcaaactggaagcaggtaagctgattctggaaagtattccattcccactacgcagcacgctggatgaagtcgttactctgctggcacattcttctcacgataaagggttagaactgacgctcaatattaaaagcgacgtgcctgataacgtgatcggcgacccgctgcgattacagcaaatcatcactaacctggtggggaatgcaattaaattcaccgagaatggcaacattgatattctggtagaaaaacgtgcgctgagtaataccaaagtgcagattgaagtgcagattcgggataccggcattggtattcctgaacgcgatcaaagccgcttattccaggccttccgacaggctgatgccagtatttcccgccgtcatggtggcaccgggctggggctggtgattacacaaaaactggttaatgaaatgggcggcgatattagcttccatagccagccgaatcgcggtagtactttctggttccacattaatctcgatctgaacccgaacattattatcgaagggccatccacccagtgcctcgcaggtaagcgcctggcctatgtcgaaccaaactccgcagcagcgcaatgcacgctggatattttaagtgaaacgccgctggaagtggtttatagcccaacgttctccgcgctgcctcccgcgcattacgacatgatgttgttaggcatcgcggtgaccttccgcgagccgctaacaatgcaacatgagcgattagcgaaagcggtaagcatgaccgatttcctgatgctggcacttccttgccatgcacaagtcaatgctgaaaaactcaagcaagatggtatcggcgcgtgtctgctgaaaccattaacacctacacgcctgttgcctgccctgacggaattttgtcatcacaaacaaaacacgcttttgcctgtaaccgatgaaagtaagctggcaatgacagtcatggcggttgatgacaaccccgctaacctgaaacttatcggcgcattgctggaagatatggtgcaacatgtggaactttgcgatagcgggcatcaggcggttgaacgggcgaaacagatgccgttcgatttgatcttaatggatattcaaatgccggacatggatggcattcgggcctgcgaactcatccaccaactcccgcatcagcaacaaacgccggttatcgcggtaacggcgcatgcaatggccgggcaaaaagagaagctgcttggcgcagggatgagcgattatctggcgaaaccgattgaagaagagcgattgcataatttgttgttgcgctacaagcctggcagcggtatttcctctcgcgtcgtgacgcccgaagtcaacgaaattgtggtgaacccgaatgcgaccctcgactggcaactggcactacgccaggcagcaggaaaaaccgatttagcgcgcgatatgctgcaaatgttactcgatttcctgcctgaagttcgcaacaaagttgaggaacagctggttggagaaaacccggaaggcctggttgatttgattcataaactgcatggcagttgcggctatagcggtgtgccacgtatgaagaatctctgccaactgatcgaacaacagctacgtagcggtactaaagaagaagatttggaaccggagctgctggaactgttggacgagatggataatgtcgcgcgcgaagccagcaaaattctcgggtaatggatgtcttgtcgagtagcaatcggctttttatgacgctggtttcagattggtgacaaagtgcctgtgtttatgccggatgcggcgttaacgccttatccggcctacaaaaccaattaaattcaatgaattaaaaaatgatgtagacctgatacatagcacaacaggctattttgcgtttagcatcagtctcaaaccggctccagatagagccggttttggttttctgtcttaacgcaccatgcacgggcgcttgttatcgaacgtccagccaggaatcagatactgcattcccatcgcatcgtcacgcgcgccaagcccgtgtttctgatacagctcatgggctttcatcacttgatccatatcgatttctacacccagccccggtttttctggcacctgtaccagcccgcctttgatctcaaacggttctttggtcaggcgctgattgccttcctgccaaatccagtgcgtatcaatagcagtaattttacccggtgcagcggcggcaacatgggtaaacatcgccagggaaatatcgaagtggttgttagagtgactaccccaggtcaggccaaattcatggcacatttgcgccacacgtacgctaccttgcattgtccagaaatgcggatccgccagcgggatatcaacggattgcagggagagcgtatggcccatttgccgccagtcggtggcgatcatattggttgcagtcggtagacctgtcgcgcgacggaactctgccatcacttcacgcccggagaaaccttgctccgcaccacacggatcttctgcataagccaggctacctttcaggtatttaccgattttaatcgcttcgttcaggctccaggcaccgttaggatcgagcgtaatacgcgcctgcgggaagcgttgcgccagtgccacaatagactcggcctcttcttccccggccagtacaccgcccttcagtttgaaatcgttgaagccatatttttcatatgccgcttccgccaggcgcaccaccgcatccggcgtcatcgcttcttcatgacgcaggcgataccagtcgcaactgtcatccggctggctttgatacggcagcggcgtggctttgcgattaccgacgaagaacagataaccgagcatttcgacttcgctacgctgttgaccatcgcccagcaggcttgccacgtttacccccagatgctgccccagcagatccagcattgccgcttctatcccggtaactacatgaatagtggtacgtaggtcaaatgtctgcaaaccgcgcccaccagcatcacgatcggcaaaagtattacgcaccagcgtcagaacgtttttgtattcacccagcgttttacctaccaccagcggaatcgcatcttccagcgttttacggattttctcgccgccgggaatttcccctacgccagtgtgaccagaattatctttgataatcacaatattacgcgtaaagaacggtgcgtgtgcaccactcagattcatcagcatactgtcatgacccgccaccgggataacctgcatttcagtaacaacaggcgtcgtaaattgagaactcatatttatgtcctttttcagaatcaatgacggccgaaaacgggacgtttacggtcaaaggtccagccggggatcaggtactgcatcggacctgcgtcgttacgcgcaccgccaggcagacgtttataggcctcatgtgccttttgtacctgttcccagtccagttccacgcccagaccgggcgcatcaggaacggcaatttttccgtttttaatctccagcggattttgggtcaggcgacaatcgccctcctgccaaatccagtgggtatcgatagcggtaggattacccggtgccgccgcgcccacatgggtaaacatcgccagagagatatcgaaatggttattagaatggcagccccaggtcagcccccagtcgtcgcaaagctgcgccacacggactgcaccggaaagcgtccagaagtgcggatcggcaagtggaatatctaccgcattgagcatcaccgcatgacccatttcgcgccagttggtggcgatcatgttagtcgcgacgggcaagccggtcgcccgtcgaaattccgccatcacttcacgtccggagaagccctgttctgcgccgcatggatcttcggcataggtaagaacatcattcagccctttgcataaagaaatggcttcatcaagcagccatgcaccgttgggatcaacggtaatccgcgcatccgggaagcgtttcttcaatgcacgaacagtgtcgatttcttgctcgccaggtaacacgccgcccttaagtttgaaatctttaaagccgtagcgatcctgactggcttccgccagacgcacaacggcttcgctgttcattgctttctgatgccgcaactgataccactcatggttgcccggcgtattttccacataaggaagatcggttttggtccgatcaccgatataaaacagataaccgaggacggtaatagcctcgcgttgcttgcctggccctaacagttcgcagaccggaacattcagcgccttacctagcaggtcaagcaaagcggcttccagcgccgccacggcgttaacgcgtaattcaaaggtccaggcacctttaccgaaggtatcaaaatcggcggcctgattacctttatgcacctgctggaccactttattcagtcgcgcaacttcctggcccagaaccatcggaatagcatcgacaagcgtctgataaatcacatctccgcccggcgcttcaccaatgccggtatgcccggcgttatcggtgagtaccacaatattgcgggtgaaatatgcgttatgtgccccaccaatattaagcaacatgctgtcatgcccggccaccggaatgactttcatatcagtaataacaggactggattgtgtcgccatcttattgccccgcaacaggtttcaactcgatacgcttgatatcgcccaccagcaccaggtagctcagtaccgcgattaaggcatgaacaccaacataaatcagcgccccattaaagctgccagtcgtgccaacgatataaccaattgcgattggcgtgacgatgccagaaatgttaccgaacatgttgaacaggccaccggaaagaccgctgatctcttttggcgcggtatctgccattactgcccaacccagcgccccgatgcccttaccgaagaaggccagcgccataaagccgatgatcatccactcaacgttgacgtagttgcagaacaccatcaccatgctcagcaacatgcccattacgatcggtgttttacgcgcaatgttcaggcttcccgtgcggcgcatcagccagtcggaaataatcccacccagcacaccgccgataaaaccgcaaaccgccggaacggaagccacaaagcccgctttcagaatgctcatcccgcgtgcctgcaccagataaaccgggaaccaggtaataaagaagtaagtcagggcgttgatacagtactgaccgatataaacgccgatcatcatccgactccctagcagctgtttgatctgcccccacttcacgctgaacggcactttaactttggtgttttgctgatccatattgatcagcgcaccacccgcggcgatgtactccagctctttcttatttacccccggatgttgatttggctcgtggatgactttcaaccagataaagctgatgacaatccccagaccgcccataaagaagaagacgtgactccagcccacttcatgcgtcagccagcccataatcggcgcgaagatcaccgttgcgaagtattgagcggagttaaaaatgctcaccgccgttcccctttcctgcgccggaaaccaggccgcaacaatgcgactgttgccggggaaagatggcgcttcagcaagcccgaccaggaagcgcagcgtaaacagggcaacgataatgccgaatccactaaagatatcgacgaagccttgcagcaaggtaaacatgctccagataaagatgctccagaagtagacgcgtttactaccaaaacggtccagcaaccagccaccagggatctgcccgataacataagcccaactgaaagcagagaacacatagcccattcccacgggatcaaggccgatatctttggccatttcgctaccggcgatagagagcgtagcgcggtcgccgtagttgaaggatgtgacgataaacaacatcaccactatccagtaacgagcatttgtgcgtttttccacactgctcgcagcctgacttaaagaactcattgttgcactcctgaaaattcgcgttagccacgctcactctggactgcgacatcgccaggaaatcagaggtgacgtagggtgttttttgccgtttttataggtcgttcgccgaatacggcgcgtgtttatatctggcaatagcagtataaaaagcgcgccatagcggctcaccgtgcaacaacacaacattaatgcgttcaatgaggcccgattttggcattagccctggacggtggaatccacttcacggaaatgaaaacaagaacaagaaaggaagggttaaaacgaagaaataaagaagagtatgaaatggatcgcttgactccaggcaaacgccagtaaaaatccgcgctatgaagcagtttttactggcatttgcctgaaaagattcgattcagcaccgctaaaacgacatttaccgctcgctgaacatatcaggacaacagcgtgccccactgttcgacccacggattactttccgtttccggttccgggttctcactggcgtcaatcaacagcatttcgccaacccgctgagcgctctgttcctgcaacaaggcatcgaactgtttgccgccattgcagaaattcacataactactgtcgccgagcgcaatcacgccataacgcagattcggctggaagcccagactatctttgattccctgaaagagtggcacaatgctatcaggaaggtcgccctgcccggtcgtggacgtaaccaccagaacatacttatcctgatagggcagccagtcgcttaattcaggatcttcaaataccgttgctttgtggccctgcgcggtcagaatcgcttccgcttcttcggccactaacagactattcccgtacatggtgccgacaaaaataccaatttccgccataccgttttctccctggattaggaacttatctctccatcctgaccgcttggcgcactgaactcaaccctttcattttcaggaagcagaccgcgccagccaaattgacttaacgcctgcatccaggtgtcgtccaggcccgcgtgaatagtcagcggctcgccagtaaaaggatgcgtcaaactcaactgactggcatgtagcattaaccgctggaggccaaaatgctcagcaccgctgcgattctggcgtaaatcgccatgtttgctatcgccaataatcggatgacgcaaatgggcaagatgtcggcgaagctgatgtttgcgtccggttttcggctccagttccaccaggccgtagcgcgtggtcgggtaacgtccggtcgctaccggcatttctacggtcgccagaccgcgataatgcgtcactgctggctgcgggcctttatcttcgcgggcaaatttatcagcgattttgtccagttcttccaccagtggataatccagcaccgcttcttccatcaaccagccgcgcacaatcgcatggtaacgtttctggatttggtgctgttcaaactgttgtgccagcagccgtccggcctcgctggataatcccatcaacaacacaccagaagtgggtcggtccagacgatgagcagtaaaaacatgctggcctatctggtcacgcacggtttgcatgaccactactttctcgtcgcgatccagccagctgcggtgaaccagccagccggagggtttatttaccgcaaccagccattcatcctgatagagtatttccagcattagctcgcatcatccgcaaaaagagcatccagtttttccagctcagccagaataagcgcgcgttgcggatggtccgtcgccagcgccatttcataatagggtgcaacggcaaaagcgcccggtaacggctgtttgttatctaacaaatcgtgcattcgcgggatcagcacccactgcaaccactccagtggttccatggtgtccataaagaacggttgggtactattaaattgatgcggctggggttcatcgtttcgccagtgctgatgttcacgcagtaacgcttcaagcgcctgcaactggagacgaacgcggtcatgagtggtcataaagcaacctcaataagaaaaactgccgcgaaggatagcaggaataaaaaaagggagcactgtattcacagcgctcccggttcgtttcgcagcattccagctacttttgttgctccctgctcatccttgacaacttttcctctggccttgcggccaatcgttcatcctgaactattgcttcctgctcacaccaccccgatgtgatacttcatcctgaagtgtccctggccttcctgacccaccgaatcatcctgaccggttctcattctccatcctggaggtgtcctttaacgcgtcctgcgtcatcctcttcgcttcatccagaagcctttccctgaaacaccatcctggtgtgtcctgcagaagtgtcatcatcctgatgttcacttcgttgtctgactccctgtcgacgaagatagaatcgtctttttcgcgaagtcttacaaggcgcttacagacaatgccttaaggaaaatttcatatgaaagttaagaattaacaatcaacattttgattttaaatgaaaataacgattcttatctttttaagtattcgcttatttcctggcgatctcctacagagtctgtaagagatctctcacaaccagatggggtatttggattacagaagaggcttaagttgattaaggaattccgcaagattactggctaaatgcgtccgtttacgtgttcccagcgtctctttgcacacttcaccggagagattacacacgctgatgacctctaactcttcttccagcgtcgcgataaatagtgtgggcggcagttttagccttttctgagtcaccagatgaccaatcagattttcctgcacccgacggaagtcgtcttcactccaggtttgcagcaatgtcagtttgatatcgccaaactgcgcgtgcatatccccggcaaactgagtcgtataaaaggtatgaattgtgggttgtatcacaatatcaaaagcgcgttcaaccgcgtttacattttgttccccggtaaacggctggggttgccagtatacggcatcttcggtagtactaataatgcacggactaggaacaccgtacagttcctcacttaacggccagcttttatgctcttcatgccacgcatcgcagtagcgtgcagtaaaatctttcagggcttgtgcggtcaaatcgtccactaatttctctcttcacttaaaccagatacacttgtcgtttagtttatctggtttatgacggtgaaacatgtcttcttatgcaaaccatcaggcacttgcgggcctgactcttggaaaaagtaccgattaccgggatacctatgacgccagcctactgcaaggcgttccacgcagcctgaatcgcgacccgctgggtctgaaagcggataacctgccttttcacggtacggatatctggacgctgtatgaactttcctggctgaatgcgaaaggtttgccgcaggtcgctgtcggtcatgttgaacttgattacaccagcgtaaatctgattgagagcaagagttttaagctctatctcaacagttttaaccagacgcgttttaataactgggatgaggtgcgccagacgctggagcgcgacttaagcacttgcgctcagggtaagattagcgtggcgttatatcgtcttgatgaactggaaggccagccgataggtcattttaatggcacttgcattgatgaccaggatatcactatcgataactatgaattcactactgactatctggagaatgccacctgtggtgaaaaagtagtggaagagacgcttgtcagccacctgctgaaaagtaactgcctgatcacccatcaaccagattggggtagcctccaaattcagtatcgtggacgccaaattgacagagaaaaactgctgcgttacctggtcagtttccgtcatcacaacgagttccacgaacagtgcgtggaacgcatctttaatgacctgttacgcttctgccagccagaaaaattgagcgtttacgcacgttatacccgtcgtggcggtctggacattaacccgtggcgcagtaatagcgattttgtcccaagcaccacaagactggttcggcaataaatttttctcaattttgcgtgctggattcacgcagaaggttgtgaaaggtcatcaggcagggctattgtaatcaaagggaatgacgatattcgtcccataaggagtttttcttgattacacatattagcccgcttggctccatggatatgttgagccagctggaagtggatatgcttaaacgcaccgccagcagcgacctctatcaactgtttcgcaactgtagtcttgccgtactgaactccggtagtttgaccgataacagcaaagaattgctgtctcgttttgaaaatttcgatattaacgtcttgcgccgtgaacgcggcgtaaagctggaactgattaatcccccggaagaggcttttgtcgatgggcgaattattcgcgctttgcaggccaacttgttcgcggtcctgcgtgacattctcttcgtttacgggcaaatccataacaccgttcgttttcccaacctgaatctcgacaactccgtccacatcactaacctggtcttttccatcttgcgtaacgctcgcgcgctgcatgtgggtgaagcgccaaatatggtggtctgctggggcggtcacagtattaacgaaaacgagtatttgtatgcccgtcgcgtcggaaaccagctgggcctgcgtgagctgaatatctgcaccggctgtggtccgggagcgatggaagcgccgatgaaaggtgctgcggtcggacacgcgcagcagcgttacaaagacagtcgttttattggtatgacagagccgagcattatcgccgctgaaccgcctaacccgctggtcaacgaattgatcatcatgccagatatcgaaaaacgtctggaagcgtttgtccgtatcgctcacggtatcattatcttccctggcggtgtgggtacggcagaagagttgctctatttgctgggaattttaatgaacccggccaacaaagatcaggttttaccattgatcctcaccggcccgaaagagagcgccgactacttccgcgtactggacgagtttgtcgtgcatacgctgggtgaaaacgcgcgccgccattaccgcatcatcattgatgacgccgctgaagtcgctcgtcagatgaaaaaaagcatgccgctggtgaaagaaaatcgccgtgatacaggcgatgcctacagctttaactggagtatgcgcattgcgccagatttgcaaatgccgtttgagccgtctcacgagaatatggctaatctgaagctttacccggatcaacctgttgaagtgctggctgccgacctgcgccgtgcgttctccggtattgtggcgggtaacgtaaaagaagtcggtattcgcgccattgaagagtttggtccttacaaaatcaacggcgataaagagattatgcgtcgtatggacgacctgctacagggttttgttgcccagcatcgtatgaagttgccaggcagtgcctacatcccttgctacgaaatctgcacgtaatctccgctcccccggtgacgtttgttgccgggttttctcgtttttggtcacttactcatcaactcatttcatttgttatatgaatgtttcttaccaccctcacgcgacaaatatcatcacagttaatatgtcatacaatttatgttgcaacgcaaacgtttccctattttcataaaccgtattttatcgctatgaaaaagaaattatcgccatgattaactaaaagtattgattttttcagttcaacctacatatattgcgcgccccggaagaagtcagatgtcgtttaatgggcaaatattgcccttaaattctcttttacttttgatttacagagtaaagcgttgggataatctatcttccaagtagattattgtatttgagatcaagatcactgatagatacataacttgtgtgtatctttccgccctcaaattattacggcggtaaatgattaagccatcgccgatagacagatttcatttttacggtcaggcaccttcccgggctgaactggctaaaagctgaattatttgcattcctccaggagaaatagatggaaacgactcaaaccagcacgattgcgagcaaagactctcgtagtgcctggcgcaagacagacaccatgtggatgctgggcctttacggcacggcaatcggcgcgggcgtgctgttcctgccaatcaacgccggtgttggcggtatgatcccgctgatcatcatggctatccttgcgttcccgatgacgttttttgctcaccgcggcctgactcgcttcgtactgtctggtaaaaacccgggcgaagacatcaccgaggttgtagaagaacactttggtattggcgcaggtaaactgattaccctgctctacttcttcgctatctacccgatcctgctggtttatagcgtggcaatcaccaataccgttgaaagcttcatgtctcaccagctgggtatgacgccaccgccgcgtgcgattctgagcctgatcctgatcgtgggtatgatgaccatcgttcgcttcggtgagcagatgatcgttaaagcgatgagtattctggtattcccgtttgttggcgtactgatgctgctggctctgtacctgatcccgcagtggaacggcgctgcactggaaacgctgtctctggacactgcatctgcaaccggaaacggtctgtggatgaccctgtggctggcaattccggtaatggtgttcagcttcaaccactctccgatcatctcttctttcgccgttgcgaagcgtgaagagtacggcgatatggcagaacagaaatgcagcaagatcctggcattcgcacacatcatgatggtgctgaccgtaatgttcttcgtcttcagctgtgtactgagcctgactccggcagacctggctgcggctaaagagcagaacatcagcattctgtcttacctggctaaccactttaacgcaccggttatcgcgtggatggctccgattatcgcgattatcgctatcaccaaatccttcctcggtcactacctgggcgcacgtgaaggcttcaacggtatggtgattaaatctctgcgtggtaaaggtaagtctatcgaaatcaacaagctgaaccgtatcactgcgctgttcatgctggtaacgacctggattgttgccaccctgaacccgagcatcctgggtatgattgaaaccctgggcggtccaatcatcgcgatgatcctgttcctgatgccgatgtacgcaattcagaaagtaccggcaatgcgtaagtacagcggtcacatcagcaacgtattcgttgtcgtgatgggtctgattgcaatctccgcaatcttctactctctgttcagctaagtcctttcgcgccgctttcgggcggcgcttcctccgttttaacgcgatgtatttcctatgattagcgtattcgatattttcaaaatcggcattggcccttccagttctcataccgttggaccaatgaaagcgggtaaacaatttaccgacgatctgattgcccgtaacctgcttaaagacgtgacccgcgtggtggttgacgtgtacggcagcctctctctgaccggtaaaggccaccacactgatatcgccattattatgggcctggcgggtaacctgccggataccgtggatatcgattccatccccagttttattcaggatgtgaatactcatggtcgcctgatgctggcaaacggtcagcatgaagtggagttcccggttgatcagtgcatgaacttccacgccgacaacctttctctgcatgaaaacggtatgcgcattaccgcgctggcgggcgataaagtcgtttacagccagacttactactctattggcggtggctttatcgttgatgaagagcattttggccagcaggatagcgcaccggttgaagttccttatccgtacagtagtgcagccgatctgcaaaaacattgtcaggaaaccgggctgagtctctctggcctgatgatgaaaaacgagctggcgctgcacagcaaagaagagctggaacagcacctggcgaacgtctgggaagtcatgcgcggcggtattgagcgcggtatttccaccgaaggcgtgttgcctggcaaactgcgcgttccacgccgtgctgcggcactacgccggatgctggtcagccaggataaaaccaccactgacccgatggcggttgttgactggatcaacatgtttgcactggcagtgaacgaagagaacgctgctggcggtcgcgtggtgactgcgccgactaacggtgcgtgcgggattatcccggcagttctggcgtactacgacaagtttatccgcgaagtgaacgctaacagtctggctcgttacctgctggtagccagcgccattggttctctttataagatgaacgcgagcatttctggtgctgaagtgggttgccagggtgaagttggcgtggcgtgcagtatggcggcggctggtctggcagaactattaggcgcaagcccggcgcaggtgtgcatcgcggcggaaatcgccatggagcacaacctcggtctgacgtgtgacccggtcgccggacaggtacaggtgccatgcatcgagcgtaacgccattgcggcagtaaaagcggtgaacgccgcacgtatggcgctgcgccgtaccagcgagccgcgcgtctgcctcgataaagttatcgaaaccatgtacgaaacaggtaaagatatgaacgccaagtaccgcgaaacctctcgcggcggcctggcaatgaagatcgttgcctgcgattaatcgctctccaaaggcctcgttttgcgaggcctcttcccgatttctcatccagccgtagcctgttccggcatcgaatgttacccttatcgcctgatctttaagggggttatcgtggctgttcatttgcttattgtcgatgcactgaatcttattcgtcgcattcatgccgttcaggggagcccctgtgtcgaaacctgccagcatgcgctcgatcagctcattatgcacagccagccaacccacgcggtcgccgtttttgatgatgaaaaccgcagtagcggctggcgtcatcagcgtttaccagattacaaagcgggtcgaccgccaatgccggaagagttgcacgacgagatgcctgcattacgcgccgcctttgagcaacgcggcgtcccgtgctggagtaccagcggcaacgaagccgatgacttagccgccacgctggcggtcaaagtgacacaggccgggcatcaggcaacgattgttagcacagataaaggctactgtcagttacttagtccgacattacgtattcgtgattacttccagaaacgttggctggatgcgccatttatcgataaagaatttggcgttcaaccgcagcagttgcccgattactggggacttgcggggatcagcagtagtaaggtaccgggtgttgcgggaatcggaccaaaaagcgccacgcagctgctggtcgagtttcagagtctggaagggatatatgagaatctggatgcggttgccgaaaagtggcgcaaaaaattagaaacccataaagagatggcgtttctgtgccgcgatattgcccgcttacaaaccgatttgcatatcgacggcaatttacagcaattgcggttggtacggtaacggcgagccggatacgccgcaaacgtcgtatccggcattatcacatcagcgcatttaccaggcggtatggtaaagctctacaatatcctcaagcgttgcttcacgcgggttgccaccggtacaaacatcatccagtgccgcctgcgccagtgccggaatgtcttccttgcgtacaccaacatcacgcaaatgtggcggaataccgacatcacggttgagagcaaacaccgcttcaacagcggcattacgcgcctcttccaggctcataccttccactttcacgcccataacgcgcgcgatatcgcggtacttctcaccggtaaagtcagcgttataacgcatgacatgcggtaacaggatggcgttcgcaacaccgtgtggagtgttataaaacgcgcccagtggatgcgccataccatgcaccaaccctaacccaacattgctgaagcccatacccgcaacatactgcccgagcgccatttcttctccggcatccttatcaccagcaacgcttcctcgcagcgccccagcaatgatttcaatcgctttaatgtgcagtgcatcggttagcgcccacgcgccacgggtaatatacccctcaatagcatgagtgagcgcatcgacacccgtcgcagctttcagcgctggaggcataccatccatcatgtcagcgtcaataaacgccacctgcgggatatcatgcggatcaacgcaaacaaacttgcgccgtttctcttcgtcagtgatcacgtagttaatggtcacttctgccgcagtacctgctgtggtaggaattgccagaatcggtacactgggtttattggtcggggaaagcccttccaggctacgcacatcggcaaactccgggttgttgctgataatgccaatcgctttacaagtatcctgtggagaaccaccaccaatagcgatcaggtaatccgcgccgctattctggaatacaccgagcccttctttgacgacagtaattgttgggttgggcactacgccgtcgtaaatcgcccatgccagccctgcagcatccatcttatcggtcactttcgccaccacgccgcattgcaccagcgttttatcggtgacgatcagcgccttctgataaccacggcgtttcacctcatcggttaaagccccaacagcaccccgaccaaaccatgccgtttcgttcagaatcattctgttagccatcatccttctccttgttgctttacgaaattactcttcaattcgtaacccataggttttgaatttctccagcactacggcaatctcttcatcgctcagcactggcaccgggtccgtaatcgccagggtcgtcaggtaaagttgcgccagcacttcaacttcatgcgccagccataacgctttttccagattcacctcacaagcgataagcccatgatgttgtaacaaagttgccttacgatttttgagagccagcgcaacatgttcagaaagttcgcgtgttccaaaggtcgcataaggcgcgcaaggaatagaattaccgccagccgccgcaatcatgtagtgaatagcggggatgcttcggttaagaatggaaactgccgtgcaatgaacggcatgattgtgaacaaccgcgttggcatccggtctgctttgataggctgccatatggaaacgccattcgctactggggagctttccttcctcatgtttaccgttgccatcaataaagacaatatggctctccgtcagtttttcatatggaatgcctgtaggcgtaatcagcatcccatcctgataacgtacactgacgttccccgctgtcccctggttcagtcccaggcgggtcatttccaggcaagtgtcaataatctgacgagcaagtttatttcgttccattagctacctctctctgattcaaaacagggcaataatgttgttcctttcacactattgaattagccgtttaattacccaccatcttcttcctgattaacaagaaagaaattcacaagcttatattttgtgacctggttcaactaatcacagtaaataactgcaagttctctttttataaccccattaaaaatgaccgctcttaaaaatatttatcaaaacggtcatttttctattcctccaagcccggaatgaccgttttcggcacaaacaattaatacggtcatctgatttgtgttttttatgatttattttctgaaacgggcatgaaatttcgattattaaagtgatggtagtcacataaagtcaccttctagctaataagtgtgaccgccgtcatattacagagcgttttttatttgaaaatgaatccatgagttcatttcagacaggcaaatattcactgatatgaagcccgaactcgctggttttgcacttttgaaaacataaccgattacgtgcttaagcttctgaacctaagaggatgctatgggaaacacaagtatacaaacgcagagttaccgtgcggtagataaagatgcagggcaaagcagaagttacattattccattcgcgctgctgtgcagtctgttttttctttgggcggtagccaataaccttaacgacattttattacctcaattccagcaggcttttacgctgacaaatttccaggctggcctgatccaaagcgccttttactttggttatttcattatcccaatccctgctgggatattgatgaaaaaactcagttataaagcagggattattaccgggttatttttatatgccttgggtgctgcattattctggcccgccgcagaaataatgaactacaccttgtttttagttggcctatttattattgcagccggattaggttgtctggaaactgccgcaaacccttttgttacggtattagggccggaaagtagtggtcacttccgcttaaatcttgcgcaaacatttaacagctttggcgcaattatcgcggttgtctttgggcaaagtcttattttgtctaacgtgccacatcaaagccaagacattctcgataaaatgtctccagagcaattgagtgcgtataaacacagcctggtattaagcgtacagacaccttatatgatcatcgtggctatcgtgttactggtcgccctgctgatcatgctgacgaaattcccggcattgcagagtgataatcacagtgacgccaaacaaggaagcttctccgcaagcctttctcgcctggcgcgtattcgccactggcgctgggcggtattagcgcaattctgctatgtcggcgcacaaacggcctgctggagctatttgattcgctacgctgtagaagaaattccaggtatgactgcaggctttgccgctaactatttaaccggaaccatggtgtgcttctttattggtcgtttcaccggtacctggctcatcagtcgcttcgcaccacacaaagtcctggccgcctacgcattaatcgctatggcactgtgcctgatcagtgccttcgctggcggtcatgtgggcttaatagccctgactttatgcagcgcctttatgagcattcagtacccaacaatcttcagcctgggcattaagaatctcggccaggacaccaaatatggtagctccttcatcgttatgaccattattggcggcggtattgtcactccggtcatgggttttgtcagtgacgcggcgggcaacatccccactgctgaactgatccccgcactctgcttcgcggtcatctttatctttgcccgtttccgttctcaaacggcaactaactgaacatattttccgaataaagtgaggaatctgtaatgaaaaaaatcagcttaccgaaaattggtatccgcccggttattgacggtcgtcgcatgggtgttcgtgagagccttgaagaacaaacaatgaatatggcgaaagctacggccgcactgctgaccgagaaactgcgccatgcctgcggagctgccgtcgagtgtgtcatttccgatacctgtatcgcgggtatggctgaagccgctgcttgcgaagaaaaattcagcagtcagaatgtaggcctcaccattacggtaacgccttgctggtgctatggcagtgaaaccatcgacatggatccaacccgcccgaaggccatttggggctttaacggcactgaacgccccggcgctgtttacctggcagcggctctggcagctcacagccagaaaggcatcccagcattctccatttacggtcatgacgttcaggatgccgatgacacaagcattcctgccgatgttgaagaaaaactgctgcgctttgcccgcgccggtttggccgtcgccagcatgaaaggtaaaagctatctgagcctgggcggcgttagcatgggtatcgccggttccattgttgatcacaacttctttgaatcctggctgggaatgaaagtccaggcggtggatatgaccgaactgcgtcgccgtatcgatcagaagatttacgacgaagccgaattggaaatggcactggcctgggctgataaaaacttccgctatggcgaagatgaaaataacaaacagtatcaacgtaatgccgagcaaagccgcgcagttctgcgcgaaagtttactgatggcgatgtgtatccgcgacatgatgcaaggcaacagcaaactggccgatattggtcgcgtggaagaaagtcttggctacaacgccatcgctgcgggcttccaggggcaacgtcactggaccgatcaatatcccaatggtgacaccgccgaagcgatcctcaacagtagttttgactggaatggcgtgcgcgaaccctttgtcgtggcgaccgaaaacgacagtcttaacggcgtggcaatgctaatgggtcaccagctcaccggcaccgctcaggtatttgccgatgtgcgtacctactggagtccagaagcaattgagcgtgtaacggggcataaactggatggactggcagaacacggcatcatccatttgatcaactccggttctgctgcgctggacggttcctgtaaacaacgcgacagcgaaggtaacccgacgatgaagccacactgggaaatctctcagcaagaggctgacgcttgcctcgccgctaccgaatggtgcccggcgatccacgaatacttccgtggcggcggttactcttcccgcttccttaccgaaggcggcgtcccgttcaccatgactcgtgtcaacatcatcaaaggcctgggaccggtactgcaaatcgcggaaggctggagcgtggaattgccgaaggatgtgcatgacatcctcaacaaacgcaccaacagtacctggccaaccacctggtttgcaccgcgcctcaccggtaaagggccgtttacggatgtgtacagcgtaatggcgaactggggcgctaaccatggggttctgaccatcggccacgttggcgcagactttatcactctcgcctccatgctgcgtatcccggtatgtatgcacaacgttgaagagaccaaagtgtatcgtccttctgcctgggctgcgcacggcatggatattgaaggccaggattaccgcgcttgccagaactacggtccgttgtacaagcgttaatacattactccctgatgtgatgcccggtcgctccggctaccgggcctgaacaagcaagagtggttagccggataagcaatgttatccggctatattgcaggagcgattatgaaacaagaagttatcctggtactcgactgtggcgcgaccaatgtcagggccatcgcggttaatcggcagggcaaaattgttgcccgcgccagtacgcctaatgccagcgatatcgcgatggaaaacaacacctggcaccagtggtctttagacgccattttgcaacgctttgctgattgctgtcggcaaatcaatagtgaactgactgaatgccacatccgcggtatcgccgtcaccacctttggtgtggatggcgctctggtagataagcaaggcaatctgctctatccgattattagctggaaatgtccgcgaacagcagcggttatggacaatattgaacggttaatctccgcacagcggttgcaggctatttctggcgtcggagcctttagtttcaatacgttatataagttggtgtggttgaaagaaaatcatccacaactgctggaacgcgcgcacgcctggctctttattagcagcctgattaaccaccgtttaaccggcgaattcactactgatatcacgatggccggaaccagccagatgctggatatccagcaacgcgatttcagtccgcaaattttacaagccaccggtattccacgccgactcttccctcgtctggtggaagcgggtgaacagattggtacgctacagaacagcgccgcagcaatgctcggcttacccgttggcataccggtgatttccgcaggtcacgatacccagttcgccctttttggcgctggtgctgaacaaaatgaacccgtgctctcttccggtacatgggaaattttaatggttcgcagcgcccaggttgatactagcctgttaagtcagtacgccggttccacctgcgaactggatagccaggcagggttgtataacccaggtatgcaatggctggcatccggcgtgctggaatgggtgagaaaactgttctggacggctgaaacaccctggcaaatgttgattgaagaagctcgtctgatcgcgcctggcgcggatggcgtaaaaatgcagtgtgatttattgagctgtcagaacgctggctggcaaggagtgacgcttaataccacgcgggggcatttctatcgcgcggcgctggaagggttaactgcgcaattacagcgcaatctacagatgctggaaaaaatcgggcactttaaggcctctgaattattgttagtcggtggaggaagtcgcaacacattgtggaatcagattaaagccaatatgcttgatattccggtaaaagttctcgacgacgccgaaacgaccgtcgcaggagctgcgctgttcggttggtatggcgtaggggaatttaacagcccggaagaagcccgcgcacagattcattatcagtaccgttatttctacccgcaaactgaacctgaatttatagaggaagtgtgaaatgctgaaaacaattagcccgttaatttctcccgaactattgaaagtgctggcagagatgggacatggagatgaaattattttttccgatgctcactttcccgcccatagcatgggaccgcaggtgatccgcgctgatggcctgttggtgagcgacttgctccaggcgattatcccgttatttgaactggacagttatgcaccgccgctggtgatgatggcggcggtagaaggtgacactctcgatcctgaagtagaacgacgttaccgtaatgcgcttagtctacaagccccgtgtcctgacatcatccgcatcaatcgttttgcgttttatgaacgggcgcaaaaagcctttgcgatcgttatcacaggcgaacgagcgaagtacgggaatattcttttaaaaaaaggggtaacaccgtaatctcataccggtacgcccgcatgacgcgggcggttatcgaatgatggggtgaaaaatatgaaagcggcacgccagcaagcgatagtcgacctgctgctgaaccataccagcctgaccacggaagctctctctgaacagctaaaggtcagtaaagaaaccattcgtcgcgatctcaatgaattacagacgcagggtaaaattctgcgcaatcatggacgcgctaaatatatccaccgtcaaaatcaagacagtggcgatccctttcacatcaggctgaaaagccattatgcgcataaagcagatatcgcgcgcgaggcgctcgcgtggattgaagaagggatggtgatagccttagacgccagtagtacttgctggtatctggcacgccagttgcctgacatcaacattcaggtcttcaccaatagccatccgatttgccatgaactcggtaaacgcgaacgcattcaactgatcagttccggcggcacacttgagcgcaaatatggctgttacgtcaatcccagcctgatttcccaacttaaaagcctggaaatcgatctgtttattttttcttgtgaagggatcgatagcagcggcgcactgtgggactccaatgcgatcaacgctgattacaaaagcatgctattaaaacgtgccgcgcaaagcttgttattgattgataaaagtaaatttaatcgtagtggggaagcccgcatcgggcatctggatgaggtaacgcacattatttctgatgagcgccaggttgcaacttctttggtaacagcctgacggaaagggtagcaggccggagacgacgccccggccttgcctgttatcgctcgtcgcgacgaccacccaccgcagcccagatgcggcggacgtgcaccgtcacttcttcgcgatcgtgatacaactgccgcgcctgaatctgagcatttatgccatgttcatcaagctgtgcctgaatatacgccagattgtgactcacttcttcgtagcgttttttcatcggcagtttgaggttgaaaatggtttcacggcaccagccattaaccagccactgtgccatcaatgccgcaactttcgccggtttttcaaccatatcgcataccatccaggagatattgctgcgcgtcggacggaatttgaaaccgtcttcccgcagccacgtcacctgtccggtatccatcagactttgcgccatcgggccgttgtcgacggaataaacccacatgttgcgcttcaccagttggtaggtccagccgccagggcaagcgcctaaatccaccgcccacatcccgttcgccaggcgttcatcccactcatccgcaggaataaacacatgaaatgcctcttccagtttgagcgtggaacgactcggcgcatctgccggaaatttcaggcgcggaatgcccatatagaacgggctattattgttgctgtaactgtaaccggtatagcagcagcctggtgcaataaagaatacatgcacaaccggacgcttcggcgtttcatagttcgccagcaccccggcatcgcgcaaggcagcgcgtagcggaacagtaaatttacggcagaatttcagtaactctttgctttcgttggtatcggcaacttcaacacgcagttcaccgcccttctctactacgccctgtaacatgccgacaatgggggtaatacgatcttctggcggcaaatgctgcaggagttcccccaccacaaaccactggcgggcaaaaattaaactactgaacggcagctcacggattaacttatcgccatcatcaggttgataacattcataaatgacataacccgcattctctttcacgcgggcaaaaccgaaaatttcccgctggccggctttatcggtaatttctgcggcgcactctttttcaaagcccggacggcacagcaatacaaccttattcatgacttacgcccttgcgctttaaacggatagcaccaactaacattaacgcccagcccgcgaggaagctcacgccgccaaccggagtgacaaacgcccacaaacgcagatgggacagcgccaggcaataaaggctgccgctgaacaacaccgtgcctaacgcgaggaaaacgctactccagtaaaaccagatactgatgcgacgctgcattgccaccgccagacctaagatcgccagcgtatgaaacgcctggtattcgaggccggtctggatccagcccatctcaacggcccccatggttttacttaacacatgcgcgccaaaagcgcccagagccacaaaaatgaagccgctaatggcggcgaaaatcagcataaaacggctggtcatggtcgtaccctacgtaaattattgttcataacgaaagcggaatttttcttgttcagcagcggctttcgccaggatccattggcgaaaggcggctattttacccagttctgcctgactgtcatgacaaaccagataaaaagcatttttactgaccagaacatcattaaacgggcaaacaagacgtccggcctcgatttcagattgcgccatcacgttatttgccagcgccactccctgcccgtggatagccgcttgcagcaccatggcgctatggctaaaaattggcccttgctgaacgttgatatgatttaaccccaactgtcgggtatatgtctgccagtcacggcggctagcatcatgtaataacgtatgtttagccagatcttccggtgtcttcaagggtttttcgccagtcagcagtagcgggctacacaccggcaataaatattcggcgtacagtttttccacccgtagccccggccagttgccccgaccataaaatatcgccacatcaacatcatccgccagcttatcttcctgacgatcaaccgcctggattcgaacgtcaattcccggataagcactattaaagctggaaagtcgcggaaccaaccaatgaatggcgaaactggggagtaaactgaccgtcaacgcccccttggcgctacgggcctggagtttacgcgtcgcttcggttaattggctaaatatctctttgatatcgaggaaatagctttgcccttcctcggtcagcaggagactacgattacggcggcggaacagttttagccccaaaaaatcctcaagagacttgatttgatgacttactgcggcttgggtcacaaaaagctcttctgctgcgcgagtgaaacttaaatggcgtgctgcggcatcaaaaactcgtaaggcatttagcggtggtaatcgtttagacatggctattaaactttgatgttaaatgaatttaacaattagatcacactatgtaacctattagtttttttaatctgagccattataaattgtccgttgagcttctaccagcaaatacctatagtggcggcacttcctgagccggaacgaaaagttttatcggaatgcgtgttctggtgaacttttggcttacggttgtgatgttgtgttgttgtgtttgcaattggtctgcgattcagaccatggtagcaaagctaccttttttcacttcctgtacatttaccctgtctgtccatagtgattaatgtagcaccgcctaattgcggtgcttttttttaccttgcgatcgcgaattactgatccagttcgaccatctctttcacgtcagtacggttgatctgctgtttgttgccattagcgtctttatagctaatcataccggtatcgttatcagtctgtggtttgccgtcagagacgatggtacgtccgtcattggtgtgcatcacatagttgctaccggaacaggcgctcagggcaaaagtcagcatacaggcagaaataattgcggcagtctttttcatcatcttctccttaaagcgattaataaatcttaatagtattgattaacaggctaaaattaacgcctaacactattcagcatatgttacttacgcggcttcgccaggatatccagataattctgatggttagcactctccttgtatcaaagtgaattttgcgtcacgatcggtgcatcaagccgaggagtaccatgaacgtttttaatcccgcgcagtttcgcgcccagtttcccgcactacaggatgcgggcgtctatctcgacagcgccgcgaccgcgcttaaacctgaagccgtggttgaagccacccaacagttttacagtctgagcgccggaaacgtccatcgcagccagtttgccgaagcccaacgcctgaccgcgcgttatgaagctgcacgagagaaagtggcgcaattactgaatgcaccggatgataaaactatcgtctggacgcgcggcaccactgaatccatcaacatggtggcacaatgctatgcgcgtccgcgtctgcaaccgggcgatgagattattgtcagcgtggcagaacaccacgccaacctcgtcccctggctgatggtcgcccaacaaactggagccaaagtggtgaaattgccgcttaatgcgcagcgactgccggatgtcgatttgttgccagaactgattactccccgtagtcggattctggcgttgggtcagatgagcaacgttactggcggttgcccggatctggcgcgagcgattacctttgctcatagtgccgggatggtggtgatggttgatggtgctcagggggcagtgcatttccccgcggatgttcagcaactggatattgatttctatgcttttagtggtcacaaactgtatggcccgacaggtatcggcgtgctgtatggtaaaagtgaactgctggaggcgatgagcccctggctgggcggcggcaaaatggttcacgaagtgagttttgacggcttcacgactcaatctgcgccgtggaaactggaagctggaacgccaaatgtcgctggtgtcataggattaagcgcggcgctggaatggctggcagattacgatatcaaccaggccgaaagctggagccgtagcttagcaacgctggcggaagatgcgctggcgaaacgtcccggctttcgtagtttccgctgccaggattccagcctgctggcctttgattttgctggcgttcatcatagcgatatggtgacgctgctggcggagtacggtattgccctgcgggccgggcagcattgcgctcagccgctactggcagaattaggcgtaaccggcacactgcgcgcctcttttgcgccatataatacaaagagtgatgtggatgcgctggtgaatgccgttgaccgcgcgctggaattattggtggattaatgacaaacccgcaattcgccggacatccgttcggcacaaccgtaaccgcagaaacgttacgcaataccttcgcaccgttgacgcaatgggaagataaatatcgccagttgatcatgctggggaaacagcttccggcattgccagacgagttaaaagcgcaggctaaagagattgccggatgcgaaaaccgcgtctggctgggatatacagtggctgaaaacggcaaaatgcatttctttggcgacagcgaagggcgcattgtgcgcggcctgctggcggtgttgttgactgccgttgaggggaaaaccgccgccgagttgcaggcacagagtccactggcattgtttgatgagctgggattacgtgcgcagcttagcgccagtcgcagccaggggttaaatgcgttaagcgaggcgattatcgctgcgacgaagcaggtttaagcacagaaccgggtcggataagacgttcgcgtctcatccgacctgattgtttaaccctgacgcgccgctttcgccatcatcttcttcagcgcatgagaaaccgcaacaaacccaaaggtggcggtcaccatcgttgccgcgccaaatccagatgcacaatccatccgcttcggcccttctgccgtggctttcatcgcacacaccgtaccgtcactctgcgggtacaccagcgcttcagtagaaaacacgcaatccacgccgagcttacctttactgtttttcactacgccaaaatcgcttttcaggcgctcgcgcaacttcgccgccagcgggtcctgaatcgttttcgccagatcggtaacctgaatctgcgtcggatcaatctgcccacccgcgccaccggttgtgaccagtgggattttattgcgccgacaataagcaatcagcgccgctttgggccgtacactatcaatggcatcaatcacgtagctataacccacgctcatatactgcgctacgttatccggcgtcacgaaatcatccaccaccgttacacggcactccgggttaatctggcgaatacgctccgccataacttccgcttttgccagcccaacgttatcgcgcagggcatgaatttgccgattggtattggtgacgcacacatcatccatatcgataagcgtgattgcgccaatccccgtgcgcgccagcgcttccgccgcccaggaaccgacaccaccgataccaaccacacaaatatgcgcgtcagcaaacagttgcaacgctttttcaccatacagacgcgctgtgccaccaaaacgctgacgccatgcatcactaattaccacagacatagcacctcagaattaaaaagggcgaggttatccctcaccctaaacgcataaatgcctgatgcgctacgcttatcaggcctacataactcctgcaatattttggatttgcatgatttgtaggccggataaggcgttcacgccgcatccggcatgaacaacgcgcacttagtcaataatcaggatgtgaggttacccctcaccctgtcatatccgtaaaaacggcatacagaatatcacatcagccgctaaagacgttacctgcgcccggggcggttttcagcacccagacacgtccatagtggttgtaccaacctgcgcggtgtccggcttccggcccgatcccttgatagatatcgaagtgttggcctttgattgcaccaccgacatccagcgccaccatcagacgcagttcgtactgaccattaaatttgccgttattatccagcaacggcacttctgccagcaaggtagtacctggcggaataatggaacgatcagaggcaacactcgcgcgaccaaccagcggcaccgcacttgcccctttcaccggagcaaaagattgcggtttaaagaagacgaaagacgggttctgttccagcagctcgcgaacctcggcttcactgtgtgtttcgccccagtgacgaatcgcctgcatgctcatatcttcttttttcacttcgccacggtcgatcagcaccttaccaatgctgcgataggcatgaccgtttttccctgcatagctgaaaaagttaagcggactgccatcaccaaagtcgatatacccactaccctgcacatccataatgaagttatccatcagggagttactgtaagcgagaatatatttatcactcaatgcccccgcgtagatctccgcacgagacggcagacgaccacgttttggcggcatacggtaaataggatactggaactcgccctggcgggtatggcgcgcctgaattaccggcgtgtaataaccggtaaactgcacgttaccatagttgtcggcaccttccatctgccaggcatcaatgccgaactggcgcatattgcgggtatcaccgcctgcgcgcagccactcttgcaccgcgttataaacattactctggttgccatacagacgcggactgctattacggatatggttaatttgctcggcaaaatcaccggcgttaatcggcgcgccaacggcatctggctggttcaccagagagaaaggctgggtaaatttcccgtctttatattgctgtccgcgatcggttggtttggaagagcaggcggcaagcattgccacaaccgtgcccataagaaggtactttacccaacgtcctttcattgttctcttcttcaggttaaaaaataaggcgcaacgaagataacaaaccgccgcgtttaatgaaatgagcagcctctccctgacgcaaattttgcacaaaaaataggctttagtgatttgtttttgttcaaaatcatgccaaatccgtgatcggggtaaaaaaaaggttgcatgaaaacgcgagcggagtatagtgcgcatccacggacgcggggtggagcagcctggtagctcgtcgggctcataacccgaaggtcgtcggttcaaatccggcccccgcaaccaattaaaatttgatgaagtaaagcagtacggtgacgcggggtggagcagcctggtagctcgtcgggctcataacccgaaggtcgtcggttcaaatccggcccccgcaaccaatcaaatttgatgaagtaaaagcagtacggtgacgcggggtggagcagcctggtagctcgtcgggctcataacccgaaggtcgtcggttcaaatccggcccccgcaaccaattattgaacaccctaacgggtgtttttttgtttctggtctcccataaaaaagcgccattcagcgcctttttatcatccccttctcgccagcgtcgccccatcggcaaaatacgctttaatccccgcaagaatagactccgcaacttcctgctggaaagtcgccgttttcagtttacgctcttcctcaacgttactgataaacgccgtttcgaccagaatggagggaatatctggtgcctttagtacggcaaacccggcctgttcaacttgatttttatgcagcttgttgattttaccgagcttattcagtaccgctttaccaaacttcaggctgtcggcaatggtcaggctctgtaccatatcgaacatggtgtggtcgacatagcggtcaccgcttttgctcacgccaccaatcaagtcgctggcgttctgggtttgtgccagatattttgccgcagtactggttgcacctttggtactgagcgcaaacacagaggaaccgctcggctgacgactggtaaaggcgtcggcatggatagagacaaacaggtcagcacgctgtttctgggcttttgctacgcgcacttgcaatggaatgaagatgtcttcattgcgcgtcatgtacaccttcatattgccctctttctcgatcagagagcgcaaacggcgagctatttgcaataccacatctttttcgcgcgttttgtatttccccaccgcaccggagtcttcgccaccgtggccagggtcaagcataatgacaatcggacgatcgcgccctgctttacccggttgtggaccactttgcgctggcggcacctgcttttcgaggtcgcctttgttgtaatcctccagcagcgccagcagcgggtcctgcatatcctgtgcattggccggatagaggtccatcaccagacgctctttaaacccggcgaccggcgcaagggcaaacagctgcggttttacgttttgctttaattcaaaaaccatccgtacggtttgcgggtcaaattgcccgacgcgcgcgctcttgatgaacgggtcgtctgcacgaatttgtgccgccatccccttgagtacgctgttcaggtttacatcttcgatatccaccaccacgcgttcagggttactcaacgcgaactgcttatatttcagctgacgattactttccaccgtcacgcgggtgtagctggacgcaggccagacgcgcaccgccacgacctggctgaccgcagccagactgacctgacttacgctcaatagccacatggcacccgcgccttgcagtaaacgacgacggctgattgcagtgttggatccactcatgcctctcccgagcaaaagaaatctaagctgtgtaacaagtaaacgactaatttgaccggaaactttagcgaaagacgcataatctgtcatctaataaacggtaaacattctttttatattcacggcattactgataaaaaagtcgctctcgcataaaatttacacttgcaccctgcgaaaaaacagaataaaaatacactaatttcgaataatcatgcaaagaggtgtgccgtggtaaaggaacgtaaaaccgagttggtcgagggattccgccatagcgttccctatatcaatacccaccggggaaaaacgtttgtcatcatgctcggcggtgaagccattgagcatgagaatttctccagtatcgttaatgatatcgggttgttgcacagcctcggcatccgtctggtggtggtctatggcgcacgtccgcagatcgacgcaaatctggctgcgcatcaccacgaaccgctgtatcacaagaatatacgtgtgaccgacgccaaaacactggaactggtgaagcaggctgcgggaacattgcaactggatattactgctcgcctgagcatgagtctcaataacacgccgctgcagggcgcgcatatcaacgtcgtcagtggcaattttattattgcccagccgctgggcgtcgatgacggcgtggattactgccatagcgggcgtatccggcggattgatgaagacgcgatccatcgtcaactggacagcggtgcaatagtgctaatggggccggtcgctgttagtgtcactggcgagagctttaacctgaccagcgaagagattgccactcaactggccatcaaactgaaagctgaaaagatgattggtttttgctcttcccagggcgtcactaatgacgacggtgatattgtctccgaacttttccctaacgaagcgcaagcgcgggtagaagcccaggaagagaaaggcgattacaactccggtacggtgcgctttttgcgtggcgcagtgaaagcctgccgcagcggcgtgcgtcgctgtcatttaatcagttatcaggaagatggcgcgctgttgcaagagttgttcagtcgcgacggtatcggtacgcagattgtgatggaaagcgccgagcagattcgtcgcgcaacaatcaacgatattggcggtattctggagttgattcgcccactggagcagcaaggtattctggtacgccgttctcgcgagcagctggagatggaaatcgacaaattcaccattattcagcgcgataacacgactattgcctgcgccgcgctctatccgttcccggaagagaagattggggaaatggcctgtgtggcagttcacccggattaccgcagtagtagtaggggtgaagttctgctggaacgcattgccgctcaggcgaagcagagcggcttaagcaaattgtttgtgctgaccacgcgcagtattcactggttccaggaacgtggatttaccccagtggatattgatttactgcccgagagcaaaaagcagttgtacaactaccagcgtaaatccaaagtgttgatggcggatttagggtaagcgatgaaaatcgtcggatgcgacatgcgtaacactcgtacgtcgcatccggcaattacgtttattcccgactactaaacaacgccgccagaccactgcgccgctcagtacgagtggcgattgccgcacttaatatgcgctcatcggcatacaggctcagacggcgacgcgcgcgggtcaccgcggtataaaccagctctcgcgttactaccggcgtgcgttggctcggcaaaatcaacgccgcatggtcgaactcgcttccctggcttttatgtaccgtcatcgcccacgtagtttcgtgctctggcaagcgactcggttgcacagacttaatattgccgtccggcatcgcaaaccagacgcgcgtcccctgcccgcgatccagcgcaataccgatatcgccattaaacaacccaagcgcgctgtcattacgggcaatcatcaccggtcgaccttcgtaccaacgagagtgcggatgacgatgaattttgcgcttctgttgcataaactgctcaattcgctcattcagtccagccacgccaaacggcccttcccgcagggcgcacaaaagctggtactcattgaacgcctgaatgattaaatccggctcggcacgcgcttgcagcagatccagataacgtccgtaacccgcaagagcttcctcaagcatcgcaatataatcttcgccgctctgtaaaagccgtttttcgatatcagtaaaatcctgctgaaaaacggttttcactgccgttttatcaccacggttgatcgccgcagctaactgaccaatgccagaatcgctgccgaaacgatagcttttttgcagcaggcagagactgtcgcgcaaagatgccgcttctgtgccggttcctgccggaacgtgagtccccgtcaggcggcttagctgcctggcacgctcggcggtaaagcccgcgttggcataagcgcagatatcgcccagcacagccccagcctcaacgctggccagttgatcacgatcgccgagaaagatcactcgcgcatgatcgggcaaggcgtcgatcagtctgctcatcataggcagatcgatcatactcgcttcatctaccaccagcacatcaagatgcagcgggttaccggcatgatgacgtaaacgctggctacccggctgcgcgcccagcaatcggtgcaaagtgctggtatcttccggaatgcgtttcttttgttcatcggtcagcggtaactgtcgcaaagccttgccgagagattcggttaagcgcgcggcagctttacccgttggtgcagccagacggatacggcagcgttcgccgtcggccatttgaattaacgctgccagcaacttcgctacggtggtcgttttaccggtgccagggccgccggaaatcacgctgatccgccgcgtcagcgccactgccgccgcaactttttgccagttaatttcatcgcttactggaaaaagtttgtccagggtttgcgccagtagagcttcatcaacctcaatggcatgattcacttcgttgaaaaagcgtgccactgtgcgctcgttacaccacatgcgattcaaataaagacgatcgccacagaggatcatcggcgtgggttcatctcccctgctgaccgcttgagaagccagcaagcattcttcccaattttgtagctcaccgatttcactgacacaggtcgccaacagcggatggctcgcctcgttattttccagtcgactaagcggcaaacaaacgtgtccctctccggcatcatgacttaacagtgccgccgcgagggtgacggcaggatgttcatctcccgccacggtcagggcaaattgcacatccagcgggcgtagctgtttgtgctccacagcttccagtaattgcttttgcaatttcattacgcctcctccagggtcataccggcaaacatctcatccatcagggcaatcaacccggcgttgggtcgggttgtgtaaatcccctgttgcggatgttctttatcaacgccacgcaggaacagataaataacgccgccaaagtggtgctcatagtcgtaatcagcaatgcgatggcgcagataacgatgcagcgccagggtataaagctgatattgcagatcatagcggtgtgcctgcattgccgctgccatagcctgttgggtgtaagcgctactgtcttcacccaaccagttggatttatagtcgagcaggtaataacgcccttcgtggcggaacaccaggtcgataaagccttttaacatgccacgtacctgcatgaactccagcggcgggcagcctgcggatagcgggtcaaactggcggattaacgtatcaagctgactggcgataagcggttcactaatcggcagataaaactccatctccacctgtttattgcgggcggaaagttgactcaggcttacgccggtttcattgagaggtgcctggaggacagccgtgatccactcggtcaataccggttcccactggctttcaaagccgccgagttccagtttttcccgcacccagttcgggtcaaccggctgggtaaaatccaggtcttcaaacaaactgtgcaagaacgtccccggactcgcaccgcgcggaaactgatgtggtgttaacgtcggttcttcaacgacgctggcaacgcctgcagcatcgacatccagccgaggcatcaaatcctgggcgataccgtgaccacgctgttgcaaaccagagtagctggtgacgcgccagttatcgccgggcaatcgttgtaacgtcttcgcattcagctctgctgtagaaacatcattaacctgccagggttggttatcaccagtttgtgccgtttgccaggcaatatcatcatcgcataacgcttcaatacaggtgcgaagccctgccgcatcttgcggttcccctttttgcagcaaacgcccgagcgcactttggtggacgtcggtgtcaccttttttatcgccacgacggcgcaccagcggtgcaacgccgagactgcaatgccaaacgctacgtgtcagcgccacgtaaagcaaacgcagatcttccgccagacgttcggcctccgcgaggtcgacgctttctggcgcagcattaagatccagaactgcctcaaagctgtggcgatcgtgataaaacgcctgctcctggacgcggaaattggtgataaacggcagccagaccaatggatattccagccctttgcttttgtggatcgtgacaatctgcaccagatgtttatcactttcgagacgcatttgttggctggaggcattactgtctggctcgaggatatgttggcttaaccagcgtaccagcgcatgttcactttccagctgcgttccggcttcttgtagcagttcgctgatatgcaagatatcggtaagacgccgctcaccgcctgccgttgccagcaagttttcagcaatgttacgcgcgctcatcagcgcccgcagcatcggcataacgccacgtttgcgccagatttgccgataaccatcgaactcttcgactaccacatcccacgcatgttcgtcattgttcagcgtttcgatatccagcgcgttcagccccatcatactcgttgccagcgcactacgcagggtgttctcacgttcgggcgtcatcaccgcctgcaacaaccaaagcatttcctgcgcttccagagtttcaaaaacactgtcgcggttgctaaggtaaacggaagggatttccagcaacgttaaggcatcgcgcacctgggcggcctcctggcggctgcgcaccagcacactgatgtcgctagcacgcaccggacgcgcgtcgtcgccgttcatcagcaacgcttcgccccgctgtccggcttgtagccagtcgcggatttgcgcagcacatacctgcgccatggtactttgataatcgccaacgccgcagctttcgccttccatcagccacattttcatcgcaggctgtgtttcacctttaaatacaaaacgtaacgcctgatttttcccggcacttttcactggaataaacggtatttcgcgaaacatgaacgcgtcatcagtctggctgaaaagcttattcacgctgttcaccattcctggtgcggaacgccagttggtgtctaaagtgtagtgggcgtgaacttcgctacgcgccttcatataagtgaagatatccgcaccccggaatgcatatatggcctgcttcgggtcgccaattagcaacaatgcggtttccggctgatggtgccagatacggcgaaaaattcggtactgctgggggtcggtatcctgaaattcatcgatcattgccaccgggaatcgcgtacggatcgccgctgccaacacctcaccgctttcgctacgcagcgcggaatcgagccgacttaacatgtcatcaaaacccaattcgccacggcggcgtttttcacgcgctactgtttcgcggatctcagccaatgcgcgggtgatcaccagatcgcggatgctcaatggttctgcaagcagttgatcgatcgcctcaaacagtggatgtcgcggggtttcccccccggccttcgtgcgatcttctaagaaacgctgggagaatttttccaggctctccggcaactgataactgtttgtctcttcttctgcccaggcgctgatcttgtcgatccatttagcctgattgctacggttaaacttgcgtcgatcaataccagaagattcgatcagcgcatccagttcacccactgcgtcgcgccactgctgttttaccgtatcaatacgcgccacaatttgcgcgtgacgggaagccagcgtttcatcatcgggcggcggtgctttgataaccggcgcttcgccttgcagataacgattaatatcgcgcagcaacgcctgcggccctttccaggtttcaaagacgacctgggctatttcacgcggcagcgggtagcagtggcgacgccagaaatcggcgcaggcctggtagcgtagcagagactcatcttcaatcagctgctgctcaaacagcatgccggattcaaaggcattcaggttgagcatgcgctggcaaaagccgtgaatagtaaagactgccgcttcatccatctgccgttcggctaacaacaaccactgcgcggcttgcgctttatcgtcgatctcttccagcaggcgttcgtacagtggattgtcggtggtttcacgcagacaggcgatgcgcaactcgtggatattgctacggatacgaccgcgcaattctgccgtggcagcctcggtaaaggtgaccaccagcagttcttcaacggtcagcgggcggggaaaggcggcggaaccgcctagtccaagtaacaggcgcaaatagagcgccgcaatcgtaaaggttttgcctgtgccggcagaggcttcaatcaggcgctcaccctgtaagggcaagcgcaaaggatctagtgtctcggcgacatcactcattcttttcactcatcaggggcattgtttgctgcaacgcgctgacgttctcccacactttccagccttcagggtgtacatattcggctttcccgttctggctgccggaaatctggctcagaatagccatgccttgcggctcgaccaccgcctgatggaagaaatcagcaagtttttgcggcgtcagcagttttatctgggccacgattttatcacggctatcgaagcgcatattgccgcgatcgaaatctttacttaacttgcttgcttcttcgccgagcgtttgcggtgcctgcagcatctgggtaattaccgcctgctggatttgcgcaaactcatctggcttcatcgctcgcaattttgcctctgcggttgggaaaaacgccttgtaacgctcccacaagaaactaggctgtttatcattgctttgcaaaaggaagcccatgccccactgacgccccacgctcattggaaacgcaaacacggcatagcccaattgttcttcggtacgcaactgattgtagaaccacggctgtacgatctgccccaacagagagctataggcactgctggtgtattcatcgtagccagtcggtacaaataccgctgccagtgcggagtcggtgctgttaccggctttttcaaagatgacggattgttttttatcgaccactacatctttgtttcgacaccactcactaccatcagcgcccaactgtttttgcacatcgcgtgccagcgttgttgcctgggcctcggtcatgttgccgataaccataaactctggtcgagccccactttttaaggcgtcgcgataggccagcacctctttcaacgtaatggagggcaaaattttacgccgttcatctcggctgaagtacggcacttggctgagcatctgcgcgggcataatcgcctgctcaaacgctttacccttttctgcggaatccatcatctggttataccaggacttcgcctgctcaagctgatcttccgtagcggtatagctaaagtacccctcgagcaatgcctggaacagctgcggcagacgctgggtgtaaccattagcattaaccataaggccgttgttagcgttggtggaaaaacttatgccaccaacgctcgcctggttgcttaactgatcaagcgccagccctgcgagataatcattgagcgcaaacatcacctgattgcgggcgctgtccatggctttcggattacgcaaaatcaggctgacatcagctttgggctcgctggcaaaataacggcttggcgcatacaccacgcgcagattgctctcatcaacaatcagctctggatggtcgtatttcttctcactcttaatcaggctgaaatcatcaggaatataagggttaagctctggcaaagagagcgcaatgtcggcggcttttttctgccagtcggcgaaagtttgtgcgctgattttatcgacctgatacggcgcatcgacaaagtaagccgttttgttgtgcggctctttcgggctgatataccagatacgcgcattctgcggcgtcatcatcgccagacgttcctttactgctttagcatcgtaccgatcggcaatattgactgcatccagcgtatgctcaacaggaacgcgaatcatggtatctgccagccattcgacgtaatccatatcacgggtgatgctcggataacggaagtcgatatccagcacattcgccagttcatcgaagtattgtttatcaatgcctttttcacgtaacagattgagatagctaaaaattgccgccacaacctgatcgcgattagccaggcctttatcggttaaagacgcagagatcgctaatacgccgctgttgccgttgacgataggatcggagttggcgctaatgccctcaactaatccctgcttttgcagccagtcagaaagtgtacctgggctgcgattgccaatcagataggtaatcaattcatcggttttactacggaacttcgcactgttgttatcgatgcgaaactcaacgcgcaacactttacgcggcagcgcagggacgtaatgaatgataatgcccttttgcgcgtcggtgactaccggcacggtgatttccggttttttgctctctttgttcggcacgcgaccaaaggtgtccgccgccatttttgccaactccggcagcggtttattactgtaaataaccgccttcatcaaattggcggaatagtacttctcgtggaaatctttcagcgcctgctgcaccggattaccaggtttgtcgcttaaagtttcgaggttaccaccagaaaacttactaccggggtgtgccgggttaatggtttctgcgctgacctgtgccatgcgcatcccgtcacgcgtacgcgccatggttaattcagcgttcaccgcattacgctcacgttcggcatatttcttgtcgagcaaaggttcagcaatagcatcggccaggcggtctaccgcaccaggcaaggcgtcgttctcaacttccagatagaaagccgtgcgatacggcgcagtgctggcattgtgactaccgccgtgcattttgagatattcggccagactgtcagcctgcgggtactttttgctccccatcagactcatatgttcaaggtaatgtgccagcccctggtacgcctcgggatcttccaggctcccaacgggcaccaccagcgcgctgaggcttttaactgcctgcggatcagaaaccagcaagaccaccataccgttatccagacgtatagcctgatactggcggttatctttatcacttttacggatggtttcctgaatcggctgccatcccgtttctgcctgacttaagggtgcccaaagggcaactaacaacaataatgctttgaaccaggtgctgcggggcattcacggacctcataatcaacttaattttctgtccagattcaacacgttaacgcaaatcatctgccagaatttaatcttgtgctgcacgagtcagcctatgtttatataaccatcagtccgtgactggtgcgcatcataaagtaagcggatagattgcgcaatttttatacagcactcaactctgattaaagcgaaacagcggtaacaggaaacgttggctctgttcaacgatggcctccattgtctctggtgttaattgccgccagagcctttgataccagatatcatcaccttcgccacgcaccatcatgttgccttcgtaagcctgaaggaatttcgtacgggctttttgcaacgtggaatcgtcatccagcatggcatcgttttgcgcgtcataacaggtttttagccacgcgccgccactttcaggtaacaccagcaatggcgcggacattccttcacgatacccctcaatcagttgactgaggtaatgcaaagcctgttcggctgcaagcggcggaaaacgccactcgccgtctttgcgtagaaaaaggcgactttcaccattaccaccgctggcacagtagacaaggtgttccagccaaagttgcattccctgggccacacttaataaagagggacgccagcgcaacaggccatccggctgcacctgcggcaaccagccagttatctgcacaccgttgcaggcgagatcaatttccatactctgccccggctggcgacaggcaatgactctgtcggcaagctgctgcatctcctggcactgtgtttcccagaaaatttcaccaaaagcgccatacggtaaatcccctgccgctcggaagcggcggaacaagcgttcggcatcatcctgctcaaccagtgcattcaataactgctgattgatttgataacggctaagtccttccagaataaatggctcggtgtcggggatttcgctgtcttcagtacggaagttcacctgcaaacgcatctggaaaaatgcccgcaccggatgtgcccagaatcgttgtagcgtttccagcggcacggtttccggtaaggtaaacggcagcggctgaacaaattcagaatgtgctttaccagcctggctggccgcaggtagccattcacgagcatagctttgtcgttcgcctggctggtagttttgtggatcaaacggcatccgggtatggaggcaagtaagatgcgcttttacccttgcctcgctttcatcacagttgagcgcttcatcgcccggtagataatgactttgcccgatgtagtcgatcagttcctgcaccagtacgctcgggaaacgctcactgttatcctgaatggaacgaccgatatagctgatatagagtttttgctgcgcggaaattaacgcttccaggaacagatagcggtcgtcatcgcgacggctacggtcgccacgcttcggtttctggctcatcaggtcaaagcccaatggcgcaagctgacgtggataaacgccgtcgttcattcccagcaggcaaaccactttgaacggaatactacgcattggcatcagagtacaaatgttaaccggtccggcgagaaaacgctggctgatacgttcttgatccagacgctgtgccagttcatcacgcaatagactcagcggcaccgcgtcgccatactgcgcacctaaaccttcggcgataatcgcctgccattgttgttcgatcagcgtcatcgccgcttcggtttccgcatccggcaggaagaaggcgttgagcatatcgcgacaaaccggcaaccactcttccagcggacgctcctgtgccagcccgcgacgccagatgtttagctgcattagcagactagccagatgccccaccagttctgcaattaagccgctgctttcatcataaggtagaacgctttgccactcgccctgcgcgctctccatcgcgtagcccaacaacatacgcgtcaggccaaatcgccaggtgtgttgtccggtggcggggagttccagctcgcgaacgttgtcgtcatctatgccccaacgaatgccggattcgttgacccactggcgtaaataacgcagcccttcttcggtgatgtcaaaccgcgccgccagcaccggcacatccagcaacgccagcacatcctcactcacaaaacgactgtcaggcagacttaacaggctgataaacgcttccagtaccggatgactctgccgcgcacgacggtcggaaatggcgtaaggtaggtaacgatccgcaggtgcgctaccaaacacagcctgaataaacggactgtagctgtcgatatcagccaccatcacgatgatgtcgcgcggagtaagtgtcgggtcttcctccagcatcgccagcaggcgatcgtgtaaaacttcaacttcacgctgcgggctatggcaaacgtggaaggtgatactgctatccagtggatcaagcgggcgtttgttatcgctacgggaaaactcttcgatgttcacaccagcaacggcgcggttttccagttccagaatgtcagactgaatgttatgcagcaggttatctggcgtgacatcgacaaaggcgtccagctcctggctgctctccaggtcagaaaggagataaatgtagtcgcgcccaagcttaccccaactagccagcagcgggttgccgacatcctgttcaccatcgctgttaaagagctgcccggcattttcgctatcacgaaatagcggcaattcgcgatcttcaaaactgtgtcgacgctgacgggtcagcagtttcgccagataagcaggatctttaatatcgccccagtaataacggcaggggttggtaaacaggagatggatttcaatatgtttacccagcgcctgtagcgcctggagataaacaggcggtaacgcggaaataccgcatataaagacgcggctaggtaaccccggcgggcaggtcgtcgcggactccagcgtttcgataaagcgctgatagagattggcgcggtgccagcgcggttgcccgagttgatgggtatattccaccagcgccttccacaacggggcttgccaggcctgtgcttctcccagcccttcaaccaaatgtcctgtttcccactgtgccagccagtccggacgatagaccagatactggtcaaacaggtccgccgctttactggaaagctggaacagttttcgcttgtcgctatcgtcagtcagataatgccgcaacagggtaaagtcttcgcgctccagcaattgcggcagcagagtcatcagtttccagctcatgctctgtttgttaaaggcgctctctttggggatttccggtaacacccggacgaacatatcccagataaagctcgctggcagcggaaaatcaatgtttgccgcaataccaaacttttggctcagggtcatttgcagccactgtgccataccggtactttgcaccagaatcatctctggttcgaaaggatcgtccagccgttcgcgttcgacaataaactccatcaacgcttccagcacgtccagacgattggaatggtagacccttaacatagcggctcctgattactgacgattcgggcaatgcaggcgggtcatctcgccttctctgcccccgggactaactagcgtaacgctgatgctgacacatcccgcctggcttgtctgcattcggttgacctgccagttggcaggtgggctaatcgcgcgcagttgcgtttgctgccagccatgccgccagagctgttggtactggtttctgctggcaagactgttcattaatgttcgctggaaaccgcttaacgcagtgacaatcatcaccatcaacaccatcgccaacattacctccggcaggctaaagccttgttgattcttcagggaagcactcataacgccctctctttcagcggttaaatcagggaagctgacataacgccctctctttcagcggacaaaaatcgctccagccgcgtgggctaaaaacaatgtttccatcaatgacttcgcctgttcgccacaagctaacgccttcataaccggcaatcaataaggcttcattatctgccagtaaacgcaaacaaacctgggcatcggtttcagcgtactggctgcactgaactgctggctgcgtctgccagcagtgcatttttccccacgccagcgcgctctgaacgatggcctggcggcgcaaactctgactttccatgctcacgcgagaggcaaaactgcgatcctgttggctcattccttgtaatagcaaactacccaaaaccagcagcatcaggaccagagccagactgctaacacccttttcgcggttcacaggttgaatcctgtcacgctatagctggcattcaccacggtttgcggttcagacttactggcagcacgcatattaaccgtcaacaccgggctgaagccgctgacatcctgacgtacgacctgaaaagtgtcgataatgatggcatccggattagtgactttatcccagcccttaccttcacaggatgtcgcaccgcgtagcgtttccagcacatgctccttcagacgaaatccaatctggtcggactcttttaccggttcgcgatcccagataccgttactgttcgcatcccactgcacaatgacacagtcaccctgtccgacaatttccagcccttcgccggtacagatgccatgacaataacccgccctctggagatgcttcgcgacggtaaatacccgcagccagatttcatcttccagcgccagcttacgggtgctcgttaaactttcacgctgtaacgcaggcagaaagcgtgccgcccccagcaacaatacgctactgatcgccatagcaatcaacacttccagcagagaaaaaccttgctcttttacaggcatccttctgtttctccttgctgacaaagccggagtcttccccacgggctaaccaccagccaccactcgcccgtactgtttttgaagcgaatatgcccggcccatgcggtattgcgcaggccaaagaaagcaaggctaggtgtcaggtcgctcatttcgacttcgggccagcgtggcacaaagaccaatggactactgccatgacaggtattggccccagcagcggaactcacaaggcaccataacgtcccctccctgataacgctgatactgtggtcgcggttatgccagttggcatcttcacgtaaatagagcaaatagtcccgcgcctggctggcggtttgccatagccgttggctctgctgccagtattgccagccatagagtccacttgcgcttagcatgaccaaaatcagcatcgcgaccagcgtttcaatcagcgtataaccacgttgtgttttcatgccggcagtatggagcgaggagaaaaaaagacgagggccagtttctatttcttcggcgcatcttccggactatttacgccgttgcaggacgttgcaaaatttcgggaaggcgtctcgaagaatttaacggagggtaaaaaaaccgacgcacactggcgtcggctctggcaggatgtttcgtaattagatagccaccggcgctttaatgcccggatgcggatcgtagccttcaatctcaaagtcttcgaaacggtagtcgaagatggattcgggtttacgtttgataatcaacttcggcagcggacgcggttcgcggcttaattgcagatgagtttgatccatatggttgctgtacagatgcgtgtcgccaccggtccagacaaaatcacccacttccagatcgcactgctgcgccatcatatgcaccaataacgcgtagctggcaatgttgaacggcaggccgaggaagacgtcacaggagcgctgataaagctggcaagagagtttgccgtctgccacatagaactggaagaatgcatggcacggtgccagcgccattttatccagttcgcctacgttccacgcactaacaataatgcggcggctatccgggtcgtttttcagctggttcagtaccgtagtgatctggtcaatatgacgaccatctggcgttggccaggcgcgccactgtttaccatacactggcccgaggtcgccgttttcatcggcccattcgtcccagatggtgacattgttttcgtgtagataagcaatgttagtgtcgccctgcagaaaccacagcagttcatggatgatggaacgcaggtggcaacgtttagttgtcaccagcgggaatccatcttgcaggttaaaacgcatctgatgaccaaaaatggaaagcgttccggttccggtacggtcgtttttctgtgtgccttcgtcgagcactttttgcatcagttctaaatactgtttcatggttcctcaggaaacgtgttgctgtgggctgcgacgatatgcccagaccatcatgatcacacccgcgacaatcatcgggatggaaagaatttgccccatgctgatgtactgcacccaggcaccggtaaactgcgcgtcgggctggcggaaaaactcaacaatgatgcgaaacgcgccgtaaccaatcaggaacaaaccactgacagctcccattgggcgtggtttacgaatatacaggttgaggataataaacagcaccacaccttccagcagcagctcgtaaagctgacttgggtggcgcggcagcacaccgtaagtgtcgaaaatggattgccactgcgggttggtttgcagcagcaaaatatcttctgtacgggagccagggaacagcatggcaaacgggaagttcgggtcaacgcggccccacaattcaccgttaataaagttgcccagacgcccggcaccaagaccaaacggaatgagtggtgcgataaaatcagagacctggaagaaggaacgtttagtacggcgggcgaagataatcatcaccacgataacgccaatcaggccgccgtggaaagacatgccgccgtcccagacacggaacagatacagcggatcggccataaactgcgggaaattgtagaacagaacataaccaatacgtcccccgaggaagacgccgaggaagcccgcatagagtaagttttcaacttcatttttggtccagccgctgcccggacgattcgcccgtcgtgttgccagccacattgcaaaaatgaaacccaccagatacatcaggccgtaccagtgaagcgccacgggtcctatactgaaaatgaccggatcaaactccggaaaatgcagatagctactggtcatctgtcaccacaagttcttgttatttcgctgaaagagaacagcgattgaaatgcgcgccgcaggtttcaggcgctccaaaggtgcgaataatagcacaaggggacctggctggttgccggataccgttaaaagatatgtatatgatccgcgttataaccctccgcgaatcagcccgcccatgccgcgacgctccataaaggctgcaacctgatggcgaacttcggtcgccagttgcgcttccagactacgctgcgcaagattttctgcttcggcataatcaatgcgccgcagcaggtattttgcccgcgctacagaacgtccgttcatagacagatggcgatacccaagcccaatgaggattgccacgcacatgggatcgcccgccatttcaccgcacaaacggagatcgattccatgtatttccgcttcccgggcgatcatcgccagagctcgtaacattgcaggatgaagactgtcataaatgttcgccacccgggtattgttgcgatcaacggccagaatgtattgagtcagatcgttggtgccaacagagatgaaatcgacccgctttgccagatgcggcagcataaataccatactcggcacttccagcatgatgccgatacgtggtttgggaatttcgtaaccgatcatctcctcgacttcacgtccggcacgttcaatcaggcggcgtgcttcatcaacttcatcgaggcttgtgaccatcggcaacagaatattcaggttgcccgtagcggcattagcacgcagcatcgcccgcacctggatcaagaagatctccggctgatcgagcgtaatgcgaatcccacgccaacccaggcatggattctcttcgctgatcggcatgtaaggcagctgcttatctgctccgacatccagcgtacgcaaggtgacgggtttatcattgaacatttgcagcatcccctgatactgcgccacctgttcttcttcgctcgggaaaccactttgcagcatgaatgggatttcagtgcgataaagaccgatgccatcaatacggctgcccagtttttcttcatgttccgggcttaaaccagcattgagcatgacttttatacgctcaccgctttttaactgcgcgggtaaattgacgtcatcttccgccagacggctaagctcaatctcttcactaattagccgctgatattcttgcagcagtaccggctccggatcgaccagcaattcaccgcgatagccatcaacgatcagcgtcctacgatgcagcacgctaggctgaatatccgcgcccatcacggtagggatccccagcgcacgtaccatgatcgcagcatgggagttggctgcgccatctcgcacgacaacaccgactaagcgatcctggggcagctcagcaagcgttgtcgcactcagttcatctgccaccagaatgaaacgttccggccaggcgttcggcccttgattagcgtcatcaagatgaaacagcaatcgctgacccagcgcacgtaaatcgccagcccgctctttgagatagttatcacttagcgcggcaaactgttcggcaaatttttcaatgaccgtttttaccgcccactctgccacgctgcctttatcaacctcggcaaacaattcgcgacgcagccgggtgtcgctaagcaggtggctgtaaagatcgaaaatagccgccgtttctttttgtgcaccggcggcaaagcgtttgctgtagcggcgaaactcgtttgccgcttcttccagcgccccggtcagtcgttcgcgttccagagccggatccagcgtacttgcctgatacacctgttccattaaaggtaacgtggcatcctgccagccttcggcaatcgccacaccaggtgctgccggtaatgcgcggattcgcgtctggcgatattgcccaaacaaggcagtcaactggctctgagaaagaatagctgccatctgggtggcaagcgtcaccaggaaggattcttcactttcgtcatactggcgcaactctcgttgctgtaccaccagtacaccaagcaactggcgacgttgaataattggtacgcctaaaaacgcgcggaaacgttcttcttttacggaggggatgtatttgaagctggggtgcttttgcgcatctgcaaggtttatcggttccgccagcctgccaaccaggccgacgatcccttcatcaaacgcgagcgttacagtgcgaccgcgtggttttttcagcccccgggtcgccatcaggtagtaacaacgtcgatcatgatcggccaggtagacgctacagacctcggtatccatcgcaagacagatgtcggtaaccagaatatttaacgcctcattcaggcgtggtgcgctggctaccttttcgactatttcgcgcaggcgagtgagcataattggcgtgacttaacctcttttacgtcgataagcagatgcgttttgtggttttggcgtattttcctgcagactcatcaccacactcgcgaactctttcattaccctacggtagacatcacgtttaaaactcaccacctgtctgaccggataccagtaacttacccatcgccagccgtcaaactctggtgtactgctggtttgcatattgatttctgcatcgccgctcaccagctgcaagagaaaccatttttgtttttggccgatacaaaccggcttcgtgtcccaacgcaccaaacgtttcggtaatttgtagcgcaaccagttacgcgtactagcaaggattcgaacgtctttgcggcttaatcctacttcttcaaacaattcacggtacatcgcctgctctgcggattctccggggttgattccgccttgcggaaattgccaggagtgctgaccaaatcgccgggcccacattacctgcccctggcgattacaaatcacgatacctacgtttgggcggtagccatcgtcatcaatcaccggactacctcaaaataaagctttatatacgaatgattgtttcatactccaggaagacggtaaaccactctctgcagggcattacacactaataacaattgaataactcacagttatgtgcagagttataaacagaggaaggggtggatagccgtttttattcaccttttctgtggatagagttgtgaagaactacggaattactacgggaaaacccggagcattctgaataagcccgatatagacattttaaaatattcattatcagtcaatgcattacatgtaattttagtaatgaaaaagagtaattcgtgacccaggtcacacctctcatttacgggttggcgaaagatcaaccaatgccgtatttatccacagaatgtgccactaagttaagcactgaaccactaaaaactggagtttcgtcgcacgtcaaggctgtaaatggaaacagtagtggaggtttttcacagttatcccagctttctgtggataacatggtgtaagatcctgtttattttcagtgaccagatttggaaaacccgttgcagtgttgcgcaactcgattaccggcaacctaaaaagcaatataaatcagagaattgaacaacgcatgtggaaaaagttacactgcgaatattcggcacataattgctgtttgttttttaatcaaggtatcatgacatgtcccaacctcgcccactgctctctcctcccgaaactgaagaacagttgttagcgcaagcacagcaactttctggttatacattgggagaactggcggcacttgtcgggctggttacgccagagaatttaaaacgcgataaaggctggattggcgtgttactggagatctggctaggtgccagcgcagggagtaaacctgagcaagattttgctgctctgggcgtggaacttaaaactatccctgtggatagtcttggtcgtccgctggaaacaacattcgtttgtgttgccccgttaacgggcaatagcggggtgacctgggaaaccagccacgtgcgccacaaactcaaacgcgtactgtggataccggttgaaggcgagcgcagcatcccgctggcgcagcgtcgcgttggaagtccgttgctgtggagcccgaatgaagaggaagaccggcagctacgcgaagactgggaagaattaatggatatgattgttctcggtcaggttgagcggattaccgctcgtcacggggagtatttacagatacgaccgaaagcagcgaatgcgaaagcgcttaccgaagccattggtgcccggggcgaacggattctgacgctgccacgcggcttttatttgaagaagaatttcaccagtgcactactggcccgtcattttctgatccagtaaccatcgctttgacctgccgctttccgggcatataattaccgcttcatttttttggcagggctttttagatgttatttgcatggataaccgatcctaacgcctggcttgcgctcggtacgctgacgctgctggagatcgttcttgggatcgacaatattattttcctttctctggtggtggcaaagcttcccacagcacaacgtgctcatgcgcgccgtctggggttggcgggagccatggttatgcgtctggcgctgctggcaagtatcgcctgggttacgcgcctgacaaatccgctttttacaatattcagtcaggaaatttctgcccgtgatttgattctgcttctgggtggcttgttccttatctggaaagccagcaaggaaatccacgaatccattgaaggtgaagaagaagggctgaaaacacgcgttagtagtttcctcggcgctatcgtgcagattatgctgctggatattatctttagcctcgacagcgtgattacggctgtgggtctgagtgatcacctgtttattatgatggcagccgtggtgattgccgtaggcgtgatgatgttcgccgcgcgcagcattggtgattttgtcgaacgccatcctagcgtaaaaatgctggcgctctctttcctgattctggtgggctttaccctgattctggaaagtttcgacatccacgtaccgaaaggttacatctacttcgcgatgttcttctctattgcggttgaaagcctcaacttgattcgcaacaaaaagaatccgctctgatactccgtacgctctcctgcgggagggcgtactcactccttttaccctcacagtttaagattttcctgctttcaagatatataacgtcggtttataaacagactattatcataggtaggccaaatgaggataaccggatgaaaaaatgggcagtaataatttctgcagtcggactggcgtttgctgtttccgggtgttccagtgattacgtcatggcgaccaaagatggccgtatgattttgaccgatggaaaacctgaaattgatgatgataccgggctggtgagttatcacgatcagcaaggtaacgcgatgcaaattaaccgtgatgatgttagccaaattattgaacgttaacaaataaggtcagcatccggctggccttaagatttttctctttcccttttcccttccctctgccatttttatattccttatgtcgtgattataaaaaggaaacggctatgcaatatcaccgtataccccacagtagcctggaagtcagcacgctggggcttggcacgatgacgtttggtgaacagaacagcgaagccgacgcccacgcacaactcgactatgccgtcgctcagggcattaaccttatcgacgttgccgaaatgtacccagtacctccgcgccccgaaacgcaagggttaaccgaaacctacgtcggcaactggctggcgaaacatggcagccgcgaaaagttaattatcgcctccaaagtgagcggaccgagccgcaataatgacaagggcatccgcccggatcaggcgctggatcggaagaatatccgcgaagcgctgcatgacagcctcaagcgcctacagactgattacctcgatctttatcaggtgcactggccgcagcgcccgaccaactgcttcggcaaactcggttatagctggacggattctgcgcctgcggttagcctgctggatacgctggacgcactggcagagtaccaacgcgcgggaaaaattcgttatatcggcgtgagcaacgaaactgcatttggcgtaatgcgctacctgcatctggcggacaaacacgatctgccgcgtattgtcaccattcagaacccttacagtctgttaaaccgcagttttgaagtaggtctggcagaagtcagccagtatgaaggggtcgaactgctggcctatagctgcctgggtttcggcacgctgaccgggaaatatctcaatggtgcaaaacccgctggcgcacgtaatacgctctttagtcggttcacccgctatagcggtgagcaaacgcaaaaagccgtcgcggcgtatgttgatatcgccagacgtcatggcctggaccctgctcagatggcgctcgcgtttgtacgccgtcaaccgtttgttgccagcactctgctgggcgcaaccacgatggatcagctgaaaactaacatcgaaagtttgcatctggagttaagcgaagacgtattagctgaaattgaagcggtgcatcaggtttatacttatccggcaccataagattaacgccggttaaaaccggcgttaaatattaatgacggcgctgccagatccacagcgccgttattgccagcgcaaacagcgcaccgaagccaatgccaatgggcacgaccgggatgcctatcattaccgccaggctgtaaatgcccagcatcaacaacatggcgctgttttcgccaaggttttgtactgcaatcgcattccccgccccgacgctttttttaccccgctcctgtagcaacgcattgagcggaacgacaaaaaagccccccatcacgccaatcagcatcaacaaggcataggctggcagcagctcgtgttgcagggaaaaaatcagtaccaccacgccaatcaaaatcccggctggcatacagcgactcacggtttccagcgtaactaacttcgctgccgcacctgcgccaaccacgataccaatcgctaccatcgcgttgagataggtgggcgtagcgttatcggtaatgcccagcgccaccggtacccacagcaccaacaggaaacgcagcgtgacacccgctccccagaataaactggtgcccaccaggctaaaacgcgtttcaccattgcgccataggctggtgcaggcattcaggaaactgcgggtcatgttgatgagattccaggactgccccggacgcgccgccgccagtttgggaatgtagatattggcaacgaccgcaccaccgtaggccagtgcgcatgcggccagggcgacgaggacatgccagtcagccagcacaccaccggctacggaaccgagcaaaatcgccgctatggtagaagcttccattaaaccgttagctttcactaacttactacccgtggttaattcgccgagaataccgtatttcgccggactataggctgcagcaccaacacccaccagcgtatagccgagaaacggattgataccaaagcagatactggctgcgcccagcagcttcaggccgttggcaaacatcatcacccggcctttggcgaagctatccgccacctgcccgacaaacggcgcaaaaagaatgtaagcacctacaaacaccatttgcaggatgggctggctccactccggatagaactgcgctttcagtaacgccagagtggcaaacagtagggcattatcgccaaacgcagagagaaactgcgccacgataaccgctttcatccccttgctccacaagctagtgttagtgtgcacactctcactcatcgtgttgttccgcttcgtctacccagcttttcaacgtgacaaagtcaggtttgccgctgccaagtaatggcatctgtttcagatagcgaatatcgcgcggtacagcaagctccggcacgccgtgctcgcgggcatactgttgcaacttatcgcgcgtcagttcgttatctgtggtgaaaagcaccagtgcctcgcctttgctggcatcgctcttaatcgcagtggcatggactttatctgggctaacaccaagtgccagttgttccaccatttccaggctcaccatttcgcctgcaattttggcaaagcgttttgcgcggccctgaatctgcacaaagccctgctcgtcaaaacgcacaatatcgccagtgtcataccagccgcgctccatttcgccgcgaacattctcggcggtgggcacttccagtacacctggcttctccacccgcagatagccgttcattatgttcggccctttcagttgcaggcgtccgccctcttcgataccagggacgctcaacaggcgcgcatccattcctggtagaatacgccctaccgtaccgggtttcgccgccatcggtacgttgatagaaacgacaggcgcgcattcggtcacgccgtagccttcaaggatgcgcaggccaaatttatcctgccaaagctgtttggtactttcttgtaatttttctgcgcctgccaccacatagcgtagacgatagaagtcatacgggttggcgaaacgcgcgtagtgaccgaggaaagtgctggtgccgaacaacacggtgcaactgcggtcatacaccaactccggcacaatgcggtaatgcagcgggcttggataaaggaacacttctgcacctgtaagcagtggcgtaaacaggcctaccgtcagcccaaaggagtgaaacagcggtaacgcgctcataaagcgatcgttggtggtgaagtcggcaatcgttttaatctgctcgacattcgccagaatgcttttatggctatggacgacgcctttcggatggccttcagaaccggaggtaaaaaggatcagcgcctcttcttccggctgctgtttaacctgtgccagacgcggcatcagcaaatgagcgaagatccatactttgtcggcagtggtgacatctgcttttaaatcttccagatagacccagcgcacctgagtaagttgctccggcagatgccagagtttgcctttatcgagaaactggcgggaagtgaagatggttttgatttcagccgccgtaatagcactggtcagcccttttaccccggcagtgtagttcatcattgcgggcatgcggcgacgggcgatggccccaaaaatcactgccgcactgatgcctgcattgggcagcattaagccgatgcgttcgccttcaacactgtatttttcaaggatgcgtccaacaaacagcgttttcgtaagcaatttgcgataggagtctggggtaaagttgacgtcttcgacacatttcttcccggctccgaagcggtacattgcactcagtaaagattcgtacagcgtttcacgcgggcgcaccgccattcgcgcttccatcattatttgatgcagcatttcgccagcgattttgcgacggtcacgggcacgcggcgcatccggcatcgccacctgcgttggtggcaaaatatgcagagtaatttgcgggaacaagcgacgtttaaccagacctttcaggcggctgaagtgcgtaagttccgccccttcaatacgcacaggaataaccgttgcaccagacttcgccgcgacaaaacccgcgccatcgtagattttcatcaggctgcctgtcgtggtgatgcgtccttcagggaaaatcaccactggtcggccctgttccaccagacgtaccagatgtttaatagccataggttgcgtcgggtcgagaggaacaaagtcgataaaacttttcagccaacgcatataccactgttggcttatactggtgtaaacggcaaacactggacgcacaggtaaaaacagtccaagcaaaatgccatcaataaaagagacgtgattaggcgtaattagaacgcgctcgcccttcagtgcctgggtgtcacccgtaacgcgaacgcgatacaaaacacggcacaaatttcgaaaaaagctaaaaagcattccaactccctttgctctgattcagtaaaagcgaatggagggagattacacgagataaagaacgcgagcgacagtaaattaggtgcgaaaaaaaacctgcgcatccgcgcaggttggtgcaagagacagggtacgaagagcgtaccgaataatctcaccaatcaatacctctgggatcttgattgtggtctgcacgacgactcttcgccagcgagaaaacgcaaaggaatgaagggaaatgcaacgaggtgtgtaaattgtcggttactgttacagattgatgaccggcaaaaaaaacctgcgcatctgcgcaggctggtgtaattcatgtgctcaacccgaagttgacttcacctatcaatacctctgggatcaccactttagcaacctgaagccaaacgccaccagcggtcaatcgcaacagcgtttcgcaaagtgtaaccaaaggtttgcaatctctttttttgtcttacttatttgcgtttggctcacattcccacgatgaaaacacgccaccccttgaaccaacgggcgttttccgtaacactgaaagaatgtaagcgtttacccactaaggtattttcatggcgaccataaaggatgtagcccgactggcaggcgttagtgtcgccaccgtttcccgcgtcattaataatagtcccaaagccagcgaagcttcccggctggctgtgcatagtgcaatggagtctcttagctatcacccgaacgccaacgcccgtgcgctggcgcagcagaccactgaaacggtcggtctggtcgttggtgatgtttccgatccgtttttcggtgcaatggtgaaagcggtcgaacaggtggcttatcacaccggtaattttttattgattggcaacggttaccacaacgaacaaaaagagcgtcaggccattgagcaactgatccgccatcgctgtgctgcgttggtcgtccatgccaaaatgatcccggatgctgatttagccagtttaatgaaacaaatgcccggtatggtgctgatcaaccgtatcctgcctggctttgaaaaccgttgtattgctctggacgatcgttacggtgcctggctggcaacgcgtcatttaattcagcaaggtcatacccgcattggttatctgtgctctaaccactctatttctgacgccgaagatcgtctgcaagggtattacgatgcccttgctgaaagtggtattgcggccaatgaccggctggtgacatttggcgaaccagacgaaagcggcggcgaacaggcaatgaccgagcttttgggacgaggaagaaatttcactgcggtagcctgttataacgatagtatggcggcgggtgcgatgggcgttctcaatgataatggtattgatgtaccgggtgagattagcttaattggctttgatgatgtgctggtgagtcgctatgtgcgtccgcgcctgaccaccgtgcgttacccaatcgtgacgatggcgacccaggctgccgaactggctttggcgctggcggataatcgccctctcccggaaatcactaatgtctttagtccgacgctggtacgtcgtcatagtgtgagtactccgagcctggaggcaagtcatcatgcaaccagcgactaaccgcagttaaagcaattccagcgccagtaattcttcgatggtctggcgacggcgaatcaaccgcgcctgaccattatcaaacagaacttctggtaacagcggacggctattgtagttggaactcatacttgcgccatatgcccctgtatcatgcagtaccagataatcacctgccttcacttccggcaaggcgcgggtttcaacatttcccccttcctgctgggtaaagacatcgccgctttcacataacggtccggcgacgacggtttccaccgttggcgcgtgttccagagaacgaccatcagctgccagggcactgatatggtggtaactaccgtacattgccgggcgcatcagatcgttgaacccggcatcaaccagcacaaagtggcggctccccatttgtttgacgctccgcacctgagtaattaatacgccagactgcgctaccaggaagcgacccggttcaatttccagtttcacagggtggcccaaatggcgggcgatttgctcacgcgcggcattccacagaccataataatgttcggtatcaaccgcctcttcaccctgttgataaggaacagaaagcccaccgcccgcagaaatagcctgtaaatcctgaccgaattcgatgacctgacgcaccatagcaccacacacctgttccagatgggcataatcaacgccagaaccaatgtgcatgtgaatgccgaccagctgcagatgatgacgttgtatcacgtccagtgcggcgggcagatcggtgtaccagataccgtgcttgctgttttcgccaccggtattggttttttggctatgtccgtgaccaaaccccggattaacgcgcagccatacccgatgccctgggctaacctggcccagttggtcgagcatatcaacagaacccgcattcaccggaatttgcaattcactgacgcgttcaagcgtcgcctgatcgataacatctgccgtaaaaacaatatcatcggggtgcgtttgcggattgtaacccgccgccaacgcacgctctatttcgcctaagctgacggaatccactttcacgccctgctcacgcattaagcgcaaaatatgaatattggaacaggctttctgtgcaaagcgcaccacatcaaactgtttcagcgctgcaatctgccgacgaataatttgcgcatcgtagacccacaccgggcagccaaattcagcgggcaaacgcagcagattttcggcggtgagatcggtatcggtgctgaacagactatgtggcataacaaactccagataagtgcttttttatgattacgccacatcataaaaagaataaaaaatatcgatttatgtcgagtctatgcaaaaatgatatggattaccggattgcgagagagcgctaatggccgccgttaacttacgtcatattgaaatttttcatgcggtaatgaccgccggaagcctgactgaggcggcacacctgctacacaccagtcagccaaccgtcagccgcgaacttgcgcgctttgagaaggtgatcgggctgaaattgtttgagcgcgtacgtgggcgattacatcctaccgtgcaaggactgcgtctgtttgaagaagtgcaacgatcctggtacggactggatcgcattgtcagcgccgcagaaagtctgcgcgagtttcgccagggagaactgtctattgcctgcctgccggtctttagccaatcttttttaccgcagctcctgcaaccctttctggcacgttatcccgatgtcagcttaaatatcgtgccccaggaaagtccgctacttgaagagtggctcagcgcccagcgtcatgatttaggactcactgaaacgctccatacgcctgcgggaacagaacgtaccgaattactctctttagatgaagtgtgtgtgttacctccgggtcatccgctggcggtaaaaaaggtattaacgccggatgattttcagggtgagaactacatcagcctttcccgtactgacagctatcgccagttgctggatcagctatttactgaacatcaggttaaacgacgcatgatcgtagaaacccacagcgccgcgagtgtctgcgcaatggtacgggcgggggtaggtattagcgtggttaacccgctcaccgcactagattatgcggcaagcggtttagtggtgcggcggttcagtattgcggttccgttcaccgtcagcctgatccgccccctgcaccgcccgagtagtgcgctggttcaggcgtttagtgggcatttacaagcggggttaccgaaactggtcacttctcttgacgctattttgagcagtgctacgacagcataattagctcagcataaaagcgacagcatcctcggcatggatcgccgcggtatcaaacacaggcaaaacactgcgctcttctggcaccagtaaaccaatttctgtgcagccaaaaatgacgccctgtgcgccctgttctgcaaggcgagcaatcacttgcgcacaataagcgcgactcgcttcggtaaattgccccagacacagttcttcaaaaataatctgattaattttcgcccgttcatccgcttcaggaataagacaattgatggaaaattgttccgtcagccgcccgcgataaaaatcctgttccatggtgtaacgcgtacccagcagcgccacacgagtcattccggccccggtaattgcacgtccggtggcatccgcaatgtgtaagaaaggcagagtgcaacgactctcaatggcatccgccactttatgcatcgtattggtacatagcacaataccttctgcgcccgcccgctgtaagccaagcgccgcctcagccagaatgtccccggttttatcccattccccgcgacgctggcactcttctatttcatgaaaatcgacgctatgtagcagcacttgcgcagagtgaagcccaccaagccgctgtttaatgccttcatttatcaaacgatagtaaggaatggtggattcccagctcattcctcccagcaaaccaattgttttcattcctctctcctgatgtgtgttaccgcaacaaggctgaataaggaacgagacaaacgcctcaacggccaagtgcccaatctctattaacgaaaaaagggccggatgtacagcacatccggcccgtgaaatcagacgccgatatttctcaacttctcgcctgccatcagtttgcgttcgatatgttccagcgtgacatttttggtttccggaatgagccagaaagtaatgcccacaaacgcaatgttcagcgcagtgtagagccagaacgtaccggcagcgccaatgctatcaagcagtgtcaggaaggtcgcgccgataatcatattgctcacccagttcgtggtggtgctacaggtaataccgaaatcgcggcatttcagcggctgaatttcagagcacaggatccacaccactggcgcggcgctcatcgcataaccggcaatacacatcatcgtcatgccaacagagagccaggacaagccactggaagccgtaccgttatcaaactgcatcaggcaatagcccagcaccagagtgcctaacgccatcacgctgaaaccaattttcagagccggtttacgccctgctttatctaccgtaaacaccgcaataaaggtggcgaacataaaggtcagccctacgaccagagtcgcaatcatctgttgttctgtggtcgtaaagcccgccattttgaagatacgcggcgcgtagtacatgatgatgttcataccggtaaactgctgcatcgcctgcaacaacataccgagaaacacagcacgacggacgttacggttgatcttaaacagtgcccaaccgccctgttttaacttcaggctttcacgaatttcgttgagttcttctcgcgctttttcgctcgtatcgcgcagcatacgcaatacttcttccgcctcaatatgacgccccttttccgccagccagcgcgggctatttggcaggaagactaccagaataatcagcagaactgctggtaaagcaagaacccccaacattgcgcgccagttaccgctataactgaacgctgtatcggataaaaacgccagcacgatgccgagtgtgaccatcaactggtacatactgatcatcttaccgcgaacgttttcacttgccatttcagaaagatacagaggagcggtgtaagacgcgatcccgacagcaatgcccagcaccacacgagcggcgattaacatctctacgctggtcgcaaaagcggaccctatagaaccgagtacaaacaggatggcccccgccatcaggctgtatttacgccccaggcggaagctcagccaaccattaaacagcgcaccaattgctgcaccgagcatcatgctactaaccacccattcctgcaaacgactggtcagcacaaagtgatcggtaatgaacggcaacgctccggcgattacgccgatatcaagaccaaataacaatcctgcgaccgcagcagctacgctaacaaacatattcatacgccgcgtatcccgcaaagaacgtggcgttaaagcagattccgtattgatagtaaccattttttcctgccagcagagagtaagacatagtgaaaaaatacgtgaacaactcacgcaggtgtcaggtcggaaacagcataaatatggattaaattgctgcgacatgtcgttatgtgatggatattccaattttcaaattaagttgaattattgagattattattaaccacctaattttacagcagataaaattcataaagttcattaattgataattaatatggattatttcataaccatgatatggattatgatgatctacaggtataaaaaaccctgccatgcggcagggtcataaaagtaagaagaatgaattaacgcgccagccaaccgccatccacggcaatggtataaccattcacataatcactagcgctggaggcaaggaacactatcggccccatcaggtcactcggcagtccccaacgaccagctggaatgcggtcgagaatttccgcgctacgttgttcatctgcccgtagttgttgagtattgttggtcgccatgtaacccggggctatcgcattaacattaatgttgtgtttagcccattcgttcgccatcaatcgcgtcacacccatcacgccgcttttacttgcggtataagaaggcacacggatcccgccctggaaggagagcatactcgcgatattgataatcttgccgccattgccttgcgcgataaagtgtttcgccgctgcctgagacatgaagaatacgctcttgatattcaggttcatgacatcgtcccagtccttttcgctgaactcgagagcatcttcgcggcgaatcaatccggcgttattcaccaggatatcaatatgaccaaactccgctaccgcgcgatccagcagtgctggaataccatcaatctttcgcagatcggcggtcaggcttaaaaaacgacgccccagcgctgtgacctgctcgatggtttcagtcggttcaacgatgttaatgccaacaatgtcacagcccgcttgcgccagccccaacgccatcccctgacccagtccagtatcacaaccagtgacgaccgcaactttaccttcgagagaaaatgcacttaaaatcataacaataccttattcgtttatgcccacaattagcgcaaatctttaacggccacatggtccatatcatcaaagacctggttttcaccgaccatgccccagataaaggtataagctttggttccgacaccggaatggatgctccagctcggggagatcaccgcctgctcgttatgcatcacaatatgacgcgtttcttgcggctgccccatcatgtggaaaacgcaggcgtcatcatccatattgaaatagaaataaacttccatccggcgctcgtgggtgtgacacggcatggtgttccacaagttacccggagccagctccgtcagccccatactcaattggcaggtttccagtacatccgggacaaaatatttgttaatcgtgcgacggttactggtgaggttatcgcctaacgtgactggagatacttcgtccggtgtgacttttttggtgggatacgtcgtatgcgcgggtgcgcaattgtaataaaacttcgccggagtgccggtatcaatactggcaaagacaacttcttttgcacctttaccaacatacagggcgtcgcggtgaccgatttcatagcattggccatcgacagtaatcgtaccggcaccgccaatattgataacacctaactcgcgacgttcaaggaaatagcttacgccgagttgtttaccaacttccccgccaacggaaaccgttttagttatcggcataatgccgccaacaataattcggtcaatgtggctgtaaaccatggtgtactcatcggcgacaaataccttttcaaccaaaaattcattgcgcagcccttgggtatccagcgtttttgcgtgcgcactgtggatgctctgtcttacgtccacatcaacctccgataatcagtgaagcgtgaaaatagaaaacgatagtgaaacactgtttcgttttctctataaagggatgatatgcccatgggctagggttttcaattaaaaataaaacaatgtttcatttttaagttaaggattaaaaaaagtgcagtgtcgatcacgaatatgtcatgagaatggaaaaatgagggagcccagaaaatgtatgtcgacttgccagccatcattattcaacagattaatgacggcagatatttatcggtaaggaggaaatgcagagttattcgtcacgttcaatggtcaatgccacaccctggcccccgccgatacaaagcgttgccagtcctttgcgggcattacgtttcaccatttcatgaaccagagaaaccaggattcggcaaccggaagcgcctatcgggtgaccgagtgcgatcgcgccaccattgacattgacccgacgctcatcccactcaagcatcttgccaacgctaagcgcctgtgcagcaaacgcttcattagcctcgataagatcgacttcagccaactgccagcctacacgctccaggcaacggcgggtcgcatacaccggcgcaattcccatcaatgccggatctacaccaacgctggcaaatgcgcgaatgcgggccagcacgggtaaattcaacgctcgtgctttggcttcgctcatcatcattaccgcagctgcgccatcgtttatggaacttgcattacccgctgtcacagaaccgagactatcaaaactaggatttaaacgggctaagccttctgcgctggcgtcagtgcgtggctgttcatcggtatcaacaaccaacgtctgcccgttactttgggtcattaccgggacgatctcatctttaaatcgtccggcgtcaatcgccgctcgcgctttttgttggctgctaagtgcgtaagcatcctgcaactgacggctgatgccatattcgcgagccagattttcggcggtgacaccaatatgataatcattgaaggcatcccacaacccatcatgcacaagactgtcaaccaactggctattgccaagctgtgcaccggtgcggctatcagtcagaacatgtggtgcgcggctcatgttttcctggccaccggcgatgacaatatcagcctcgccacactgtatcgcctgagtagccagatgcagtgctttaagcccggaaccgcaaacgtcattaatagtgattgcagaaacgctattaggcagaccacctttaatagcgctttgccttgccggattctgccctgcccctgcagtcaacacctgaccaagaattacttcatccaccgcatatgcaggaacgccggtacgttctattaacgctttcacgaccagactaccaagttccacggcggaatgacccgctaacgcaccacgaaagcagccgataggtgtccgtaacgccccgacaatcacaacgtctttcatcacaacctcgcaccaattaacagtgcaatagtaaatgattgttaattacagttatcttaattgtttaaaaaaagtgatttttatcacaaaggaaatatgcctgagcagcagtcagagacataactggcacgtaaggtttgcaaccactaacccaccaatagaggggtagatagggcgttaatctcccatacttaacctggtttatggtaaattgccctccattttgtttaatttgtagatgatacgttcagataatgtctaatatttggtctaaagaagaaactctgtggagtttcgcgctctacggcacagccgttggtgcaggcacgctcttccttcctattcagttaggtagcgcaggggctgtggtcctgtttattactgctctggtcgcctggcctttaacatattggccacataaagccttgtgccagttcatcctcagtagtaaaacaagtgcaggtgaagggataacgggcgcggtaacacactactatggcaagaagattggtaatctgattaccacgctgtacttcatcgccttttttgtcgtcgtgttgatatatgcagtggcaattaccaacagtcttacggaacagctggcaaagcatatggttattgatcttcgcatccgtatgttggtgagtctgggtgttgtattaattctgaatctcatttttctgatgggacgtcatgccactattcgggtaatgggatttttggtattcccattgattgcctatttcttatttctttccatttaccttgtcggtagttggcaacctgatctattaacaacccaggtagagttcaatcagaatacccttcaccagatatggataagcattcccgtgatggttttcgcctttagccatacgcccattatttctacgtttgccatagacagacgtgaaaaatatggcgaacacgctatggataaatgcaaaaaaattatgaaagtcgcttatctcatcatctgcataagtgtactgttctttgtctttagctgcctgctttctattccacctagctatattgaagctgctaaagaagaaggggtcaccattttaagcgcgctttctatgctgccgaacgccccagcatggttgagtatttccgggattattgtcgcagtagttgcgatgagcaaaagtttcctgggtacgtactttggcgttattgaaggtgccacagaggtcgtcaaaacaacactacagcaggttggtgtaaagaaaagtcgtgcatttaaccgcgcactaagtattatgttggtaagcctgattaccttcattgtttgttgcattaacccgaacgcgattagcatgatttacgcgatcagcggcccgctcattgccatgatacttttcatcatgcctacgctgagtacgtatctcatcccggcgcttaaaccctggcgttccatcggaaatctgattacgctgatcgtgggtatcctgtgcgtaagcgtaatgttctttagctaatatcagttgtggatggttcaaaattgctacaattttgaaccattccatttttcataatattcatttgttattattccaccctatcacttctctcgtcatatcctagtattatcagttagttaaacacacaaagagatctgaacatcttaaataagactatttaagatgcataacttagattcgcaagatatcttctggtcattcaaaaacaatttgcgatatagatattcttataccatgagatagttatctggaccgctctcaaccatgcaagattaaatcagtgaaacataatcatatttgataacgagaaatgcatttttaaatgccttactcagaattatagcaaatacagattaatcgcaatttttcccggcaaaattacaaaatcatggtgtattgacatcatcaataaccaatgaaattatgcaattatatacggatagggaggttcttaacatggggctttgtagtcgttataaaagtcttacatgcaatagttgcagtatgcattgccaaataatgccagaagagagtccgcgtttgcagtattgcgcaaacagctgtttttgtatgtggcccgaagaaagtagttattttaatcgtggtgtggtagaaggtatcttaacaaaaaaccacaatgcgagattaagcggatatatttttgtcgattttagtgtaagttttttacgtctattccttgaaaaagactggattgactatcttgcaagtactgacatggggattgttttagtcagcgaccgcaatatgcaaagcttagctaattactggcgaaaacacaacagtgcaatatctgctgtcatatataatgatgatggtcttgatgttgccaatgaaaagatcagacaactatttattggtcgttatttaagttttaccggaggtaacacattaactcagatggaattcaccataatggggtatatggtttctggttataatccatatcagattgctgaagttctggatatggatatccgtagcatctacgcgtacaagcaacgaatcgaaaagagaatgggtggtaaaataaacgaattatttattcgtagtcatagcgtccaacattgatactcaacgaccagccagaatcatactctgtttatacgggcatttattgaaatgtccgtattttataaataggccgtcccctcaagagtaaacaccatagtatttaaaaccatcacacgaaaaattcagaagcattacgaaatatgaatttacaaacaatagtggcataaatgttaaccatgttaatttacgtaaagttttacgttgcaacattaaagcctcatttcaatcatcatgataaatataaaattaatatatatttatgccgtaaataccaatatacttagcaaactatgtgatctccatttcgattgatttagtgtttattgacgtatgtactggattattaacgataatatcgagttctggcctgagcaccgaaaattaataagcgtacataacgccgatcttaacgtcgttctgacaacgccagccagtcgatgtttaagtcttctacttgaagcttttcctgatgtggttgcacaacaagattttttcaccagagtctgggaagaagaaggtatgcgtgtgcctactaacacgttatatcagaacatatccattatcagacgcggatttcgcgctgttggtgatactacccacagcctaattgcaaccgtgccgagaagaggattcaagatccataatgacattaacatacaaaatcatgtaataaacagcagtacagacgcacatacacacaatgccccacctgccataaaagttaatgcgggatacaaagagagcattggtggcgcaaagaatttcaataacaaaatcctcaaacatataaaaagtcatctaattatgttgagcgcatttgtcataggcgcatattctgcatattggctatggaataataatcaaccgaagccatttttcaaggattacaagactgttgcggaaattaatggctgccattttaatgtaacagaagatacaattgatgggttgaaagagttcgataaatataaaacacggatactggatagcgggattaactgtaaaaaacatccgtggttatacttccctcttgcaaaatccagtccggggatgattgttatggcatgcaataaaaactataaccaacatgaagtggcaaactgtttaaccctgtcttaccgtgaggttaatcgtgattgattataaaaaaaacttattatttattttagtttttatcagtgggtttattctcttcactgtctattcttacactgcagaaaaaatgatatataacgaaacatgcactgcaaattgggtaatttttaatgaccagggacgagcaaatcttaccatcgactttatgtataacaaaaaaaataaaacaggaactgttgcgttgagtggaacctggcaacaaggtaacagagaaagtaaaagtatacggcgaaatattgaatacacatggattgaaaactatgacacagcccatttaacaagtaagaaagttaataagtttgagattatggatcaagttgatgatgatagacttgcacaacttattcctgatttttatgtctttccagaaaaaagtgtaagctataatatactaaagcaaggtaagcatgcttttattttgagcattggtaacagagcaataatgcattgtgcaaggtaaactaaaatagataacaaaaagatggaacctcgttaatcataaaacaataaaattaaatattctcgcagtatatggcagtctaaagcatcaaagatttgatcaacatctttcattttagacatctccttgcaatgtaaaatatcatgtatcaacaacatctggtgcaaatccaactgtcgaactcgacattcatcttagctcgattattattccttcgtacagtgcttgtaaacaatacagaaagaggattattaagaaccagtttactcagactatcaatagaggaaaggactaacgtttctttaaaagaattgatttcatcatctgttaaactaaactcatcattgacagatcgactgatataactgtttttaactttactctttacgttgactttattgacagaattaacattcacatatctactatttaatgtccaacttgttgtttgcgtgagaacattctcagcattaaggaatttttttaacggaatccttggtttctttttgctgtcgctatttacaatatcatgcatatagaccatttcatgaatctggctaaattcaatgtccattgtatacctcacatttttaccgtgactcgatgttactgttcaataatcaccttccatcaatactaaaattaatacccctaatgtgccgataacaaatatagtcattctacgtaacgtctccataaggtgatatttgacattatcagaagctgcgaattcggattttgctctaatcaaatgagagaaatgtaaaatgaagccacgaaatattaataatagcctaccactgcaaccattagttcctgatcaggagaacaaaaataagaaaaatgaagagaaatccgttaatccagttaaaatcacaatggggtctggtttaaattatattgaacaagaatctcttggaggaaaatatctaacacatgatttgagtataaagatagcggatatttctgaagagataattcagcaagcaatattatctgctatgagcatatataaatttagcataacagatgatttaatgagtatggctgtaaatgaactcataaaactgaccaaaatagagaataatgtagacctgaataaattcactactatatgcacagacgttctatccccccgcgtcaccagacataataaagaaaaaaacaaacgacattctacccttctcaaaaatcccctttttaattttcattgaaaaaatggcaattgatactatgaatccaggtcatacacattaaggcatttatgtaatgtcgtaattaagataactaataaggtgaatattagtaaaacaactaatgatgttattagtttgtagtgaacagtacttttaccaataatgaaaaatataccataagcaatgcaagcttaaaactcataatttaaaaaagataaatataaaaatatcaatgagtcaatcaataataatttggcatcacgagacacatcacagaggaatattatgagcacagaaacaattgaaatattcaataatagtgatgaatgggcaaatcaactaaaacacgcattaagcaaaggagaaaatctggcattactacatggtttaactcctgatatccttgatagaatatatgcatatgcattcgactaccatgaaaagggtaatataacggacgcagaaatttattataaattcttgtgcatttatgcgttcgaaaatcatgagtatctaaaagattttgcaagtgtatgtcagcccaaaaagaaatatcaacaagcatatgacctttacaaactaagttacaattacttcccgtatgatgactatagtgttatttatcgtatgggtcaatgtcagattggggctaaaaatatcgataacgcaatgcaatgtttctatcacattattaacaattgtgaggatgatagtgttaagagtaaagcgcaggcatatattgaactcttaaacgataatagtgaagataatggctaagcattacaatcatttggttaaatttgctggttatagtgcagttaaccactataaccagcacctcttatgttttcttaaatcagcatcttaaaacagttaagagcatactataaatcattatttttcaatgcgttagagaacaatctactttatcaaaattgaataaggctatttcagattacatcactgaattcctaagataaattagtgaacacaaccatagatatgtcaaatgtaatttcctgtagcgttaatgacacataaatatgaatagccataatttctattgcttaagcaggatgcaagaaaccaattttttcatagaggttaactaatggacttagaaaataaattcagttatcattttcttgagggattaacgctcacggaagatggaattcttactcaaggaaatgagcaagtttatattccacagaaagagttaggtgtattaatagtattacttgaatccgctggtcatgttgtactgaaagatatgatcatcgaaagtgtatggaaaaatattattgttagtgacgagtccctgacaagatgtatctattctttgcgctgcatttttgaaaaaattggctatgatcgttgcatagaaacaatctaccggaaaggttatcgtttcagcgggcaggttttcaaaactaaaattaatgaagataatactagtgactattccatagctatattccctttcactactagtttgaatacactggatccattaatacttaatcaggaattagtgcaaatcattagtaataaaaaaatcgatggtctctatacctatccgatggctgcgacaaatttttgtaatgatcacatatctcaaaatagtttcttgagcagattcaagccagattatttcgttacaggaagaataaaccagaataatgcagtgaacactttatacattgagttgatcgacgctaaaaaccttttcctcatcgccagtaatcatctccctgttgatgaactacataatacaagtcaatttattatagataatatccttcaaacggtacataaaccagaacgatctgtaagattagctaagcaggaccaaggatataagaatcattatttaagtgatgaaatgttagccggaaagaaagaactttacgacttcacccctgaaagcatttacagggccatgactatatttgatagattacaaaataaaagtgatatacagacgctaaaaacagaatgttattgccttctagcggaatgccatatgtctttggcacttcatggaaaaagtgaacttgaacttgctgctcaaaaagcattagagcttttagattatgtaagtgacataaccactgtcgatggaaaaattttagctattatgggactgataactggtctgtctggacaagcaaaagtatctcatatcttatttgaacaggctaagatacacagtactgatatagcctctctctactactatagggcactagtccactttcataatgaaaaaattgaagaggcaaggatttgtatagacaaaagtctacaactcgaacccagaagacgaaaagcagttgtgataaaagaatgtgtagatatgtatgtgcctaacccgctcaaaaacaacattaaactctactataaagaaactgagagtgaaagccatcgagttataattgacaacattttgaaattaaagcagctgacgagaatttgtatgcgataaatttttattgacgcaattttattatttagatgtatgcaacttgttatttaaacaacagagataaaaatatctaagatattcaccttattgcaagatatttaaaatgctctagagttaaaagtatgatgtaaagaccattggcctggacaattaaaaaagggagctttatgactaatccaatcggtatcaataatttatctcaaagtagtaatatagcgaatgcaacgggtgatgaagtcgtaagtttagataaacacatcaacaccagtgctactgatacagatcaaatacaagcatttatagttagtacatggatggcgccttttcaaaatgatatgtatagtgaagataatcctatcagtccttactataaaattgagtggtaaacgattgaccaaataaatcataacgagatacttttataatagtatctcgttcctttcattcaatcctcacacatgaaaaaatatgcgctcaccaaaagttaaattcttaaccatcttcacgttttgtatatttattacaaaaatgtctttcgccagcaactcttgctctaatgaagcaggaacaatgttcagaatcgaaccaaatttaattaaagctatcgctcttgttgaaagcaatctaaaaaaggatagcataggcaagaacagagataagaataacaatataaagagtttagattattggttaatgcagataaaccagatgcatattcccctgttaaaaaaacgtggaataataaaagatgaacgagatttgttagataacccttgtctgaacattaaaataggaaccgagattttatataaccattttagtcgttgtggagtaacgtggcaatgcctggggacttataatgcgggttttgcaatggataaccaaaaaaagagacagcaatatgccccaaaatatatattgtatataccaggcttaatgaactaaacaatcgtaaggcttcagcaaaatgagcctaaagcctcttttttttatatagtgcaaacacccatacgtaaagctgttttgatcaactcgataccactgtgaacatctaatttcttcatgatattgagtctatgagtttcgactgttttcctgcttaactgcaagaaattagcgatttctttgtttgttttaccatcagctatgagttgtaatatttcactctcacgatttgtaagttgattatcagaggaatacctggaagatattttttcacaatccatatgtacactatcaaaataagtgtaaccattactaatgctatcaatagcacgatttagtttcgccgggtgactggttttccatacgcatcctttcgcacctgcttcaagcaattttatactatcaatatacggcatctttgctacaaatgtaataatatgagcatctatcttatggcttttaacccattttacgagttcggcccccatcattccacctgcaaattctcctaaaataaatatttaggctgtagatttgttacactccgctatagctttcttcagatctttatagcccacttatttaacaacttgaaaataaggtgttttacctgggttgttacaaaaggattgcattgcgtaaacgctttttatttacaacaaaatggggaagtattacggcgaagataaattggagcgggcgaagggaatcgaaccctcgtatagagcttgggaagctctcgttctaccattgaactacgcccgcttcgagatgcgtaaggcattataaaccttacgctctccttagcaagtgccacgctgctgactgctgattaattcgccatcagcattttggcttgctgccctgaggcggcaagtaacgtagcggatcaattgccgttgcacggtaacgaatctggaaatgcaggcgaacagatgccgcatccgtgctccccatagtggcgattttttgcccagccttcacgctttgcccattatttaccagcatcgtgtcattatgggcgtaagccgtaatgtaatcttcactgtgtttaatcatgatgagattaccgtagccacgcagctggttgcccacatacaccacctttcctgcacccgcggcgtaaataggtgtaccccgtggagcactgatatcaatccctttattgccgccatctgctgtgctatacggcatgataactttccctgtcgttggccataaccaacaacgttgccctactggcggccaggaacttttcggtaccgcactactcggtgtaacgcttgcggttttggtcgtacttttggcggtacttttacgtgtaatactgctacttttcgccccacccagttttagtttctgaccaacttcaatggtgtaagggggggaaatgccgttcagtcgcgccagttcttttacgctggttcccgtggtgcggctaatacgatatagcgtatccccccgtttcacggtgtaaacggagccggaatacgttcctgtatcggaacttttgctaccgctacagcccgccaaaagcagtccaacgcttaacaacatcacgatacccagagattttttattcaggcgtcccgcactcaaaatctttcctcgcttaaaaaacaagacgccttatcatagcagccagcctcttgatacccaatctcttgcttctggaaaaacgtggtaatagagaaagaggttaatttcatttggcaaagggaagtatcatcagcaaaatattcgctgtagaggtatcgaacttcctgactttttaccctatttcccatcctgatgcgtaataatcccaatttatcacattgattttatcgccactcatattgatacgtatcactgcccctattcagagtcctgtttcgtatcatatctgtgtttttttaacgtcatcacacttcctacctcccctaacgcttatcgtcgtttctggcgtaaatcttgcctgcttagactaaatctttgccataagaaccaaatgttcaaatcgaggggatttctatggaagcgcgggaagcaaccgctacgggtgaatcatgcatgcgcgtcgatgccattgctaaggtcaccgggcgggcacgatatactgacgattatgttatggcgggcatgtgttatgcgaaatatgtacgtagccctatcgcacatggttatgccgtaagtattaatgatgaacaagccagaagtttgccgggcgtactggcgatttttacctgggaagatgtgcctgatattccattcgctacagctgggcatgcctggacacttgacgaaaacaagcgcgataccgccgatcgcgcactgctaactcgccatgttcgtcatcatggtgacgccgttgccatcgtcgtggcccgcgatgaactcacggcagaaaaagcggcgcaattggtcagcattgagtggcaagaattacccgttatcaccacgccagaagcggcgctggcagaagacgctgcaccaatccataacggtggcaatttactgaaacaaagcacgatgagcacgggtaatgtccaacaaacaatcgatgccgccgactaccaggtacaggggcactatcagacccccgttattcaacattgtcacatggaaagcgtaacaagcctggcgtggatggaggatgacagccgaattaccatcgtttccagcacccagatcccgcacattgttcgccgcgtggttggtcaggcgctggatattccctggagttgcgtacgagtcatcaaaccatttgtcggtggcggttttggtaataaacaggatgtactggaagagccaatggcggcattcctgaccagcaagcttggcggcattccggtgaaagtttcccttagccgtgaagagtgtttcctcgcaacccgtacccgccacgcttttaccattgacgggcaaatgggcgtgaaccgcgacggaacattgaaaggttatagtctggatgttctgtctaacaccggcgcttatgcatctcacgggcactccatcgcttctgcgggggggaataaagtcgcttacctttatcctcgttgtgcctacgcttacagtagtaagacctgctataccaacctccccagcgctggtgcgatgcgtggttatggcgcgccacaagtcgtatttgccgttgagtctatgcttgatgacgccgcgacagcgttaggtattgatcctgttgaaattcgtttacgcaacgccgcccgcgaaggagatgctaatccgctcacgggcaaacgtatttacagcgcagggttgccggagtgtcttgaaaaaggccggaaaatctttgaatgggaaaaacgccgtgcagaatgccagaaccagcaaggcaatttgcgccgcggcgttggcgtcgcctgttttagctacacctctaacacctggcctgtcggcgtagaaatagcaggcgcgcgccttctgatgaatcaggatggaaccatcaacgtgcaaagcggcgcgacggaaatcggtcagggtgccgacaccgtcttcagccaaatggtggcagaaaccgtgggggttccggtcagcgacgttcgcgttattagtactcaagataccgacgttacgccgttcgatcccggcgcatttgccagtcgccagagctatgttgccgcgcctgcgctgcgcagtgcggcactattattaaaagagaaaatcatcgctcacgccgcagtcatgctacatcagagtgcgatgaatctgaccctgataaaaggccatatcgtgctggttgaacgaccggaagagccgttaatgagcttaaaagatttggcgatggacgctttctaccaccctgaacgcggcgggcagctctctgctgaaagctccatcaaaaccaccactaacccaccggcgtttggctgtacctttgttgatctgacggtcgatattgcgctgtgcaaagtcaccatcaaccgcatcctcaacgttcatgatagtgggcatattcttaatccactgctggcagaaggtcaggtacacggcggaatgggaatgggcattggctgggcgctatttgaagagatgatcatcgatgctaaaagcggcgtggtccgtaaccccaatctgctggattacaaaatgccgaccatgccggatctgccacaactggaaagcgcgttcgtcgaaatcaatgagccgcaatccgcatacggacataagagtctgggtgagccaccaataattcctgttgccgctgctattcgtaacgcggtgaagatggctaccggtgttgcaatcaatacactgccgctgacgccaaaacggttatatgaagagttccatctggcaggattgatttgaggataacatcatgtttgattttgcttcttaccatcgcgcagcaacccttgccgatgccatcaacctgctggctgacaacccgcaggccaaactgctcgccggtggcactgacgtactgattcagctccaccatcacaatgaccgttatcgccatattgttgatattcataatctggcggagctgcggggaattacgctggcggaagatggcagcctacgtatcggctctgcaacgacatttacccagctaatagaagatcctataactcaacgtcatctcccggcgttatgtgctgcggccacgtccattgctggaccgcagatccgtaacgtcgctacctacggtggaaatatttgcaacggtgccaccagcgcagattctgccacgccaacgctaatttatgacgcgaaactggagatccactccccgcgcggtgttcgtttcgtcccgattaatggctttcacaccgggccgggcaaagtgtctcttgagcatgacgaaatcctcgtcgcctttcattttccgccacagccgaaagaacacgcgggcagcgcgcattttaaatatgccatgcgcgacgcaatggatattagtacgattggctgcgccgcacattgccgactggataacggcaatttcagcgaattacgcctggcatttggtgttgccgcgccaacgccgattcgctgccaacatgccgaacagactgcacaaaatgcgccattaaacctgcaaacgctggaagctatcagcgaatctgtcctgcaagatgtcgccccgcgttctagttggcgggccagtaaagagtttcgtctgcatctcatccagacgatgaccaaaaaagtgattagcgaagccgtcgccgcggcggggggaaaattgcaatgaatcacagcgaaacaattaccatcgaatgcaccattaacgggatgccttttcagcttcacgccgcaccaggcacgccgctcagcgaattactccgcgaacaaggactgctaagtgtcaaacaagggtgctgcgtgggtgaatgtggtgcctgtacggtgttggtcgacggcacagcaatagacagttgcttataccttgccgcctgggctgaaggaaaagagatccgcacgctggaaggtgaagcgaaaggcggaaaactttctcatgttcagcaggcttatgcgaaatccggcgcagtgcagtgcgggttttgtacgcctggcctgattatggctaccacggcaatgctggcgaaaccacgcgagaagccattaaccattacggaaattcgtcgcggactggcgggaaatctttgtcgctgcacggggtatcagatgattgtaaatacagttctggattgcgagaaaacgaagtaaaaggatatccggcctgaattcaggccggattcactgaggttatgtgtttaacaactcatatttcttaatcttgcgatagagcgtagcaatgccgatgcccagttcatcagcaacttgcttcttgctgttatgacgactaagcgcctcgcggatcatttgcttttccatctcctccagcgccgtgccgcccgcatcatcgagactcaggtgcgcctcactgacctctgttacatcactttgctccgttgtgccattattcagcagatttggcggcaatagcgtgctgtcgataacttcaccactaggaaccacgttaaccagatattccatcaaattgcttaactcgcgcaggtttccgggccaacgatgcttacgcaatatttcgacgacatcgggagcaatgccaggataaacgcttcccagacgacgggtatgcagatgtaaaaagtaatgcaccaatagttcaatatcttcctgacgttcacgcagcggtggcagagttatcgggataacattaagtcggtagaagagatcttcgcggaatttaccttcggcaatgaactgggccaaattctgattagttgcagaaatgatgcgaatgtcgacttgtattgggctactggcaccaatcggcagaatttcacgtgcctcaatagcgcgcagtaatttagcctgcaacattaatggcatatcacctatttcatcgagaaacagcgtgcccgtattcgccgcctgaatcaaccctgttttaccgttggcagaagcgccagtaaatgcacctttaacataaccgaacagttcgctctccagaagctgctccggaatcgcggcacagttgatagcaataaagggtttattccgtcttccgctcaacttatggattgcacgggcgacgacttctttacccgtgccgctttcaccaaccaccataacgctggatgggctgggtgcaatacggctaatgagtcgttttaattgccgcataacacggcactcgccaaccaattgttcaatatgcggttcatcaggtgcatttgctacagaaaaactggtatggctttggtgaaacgccattaaaaataattgtcggccctgaatgttatgcaattgaccaatgattaattcacttttatcgtcccaactaacaatatgctgcatatgtccatgggtaaaattactctcaaatgttaatggtctgaaacggataggtttcccaataatattattttgcacaacaccaagtgtttttaaggcagtctgattaacaaactgaacccgattttcatcatctacaactaatacgccctgatccatattatcgatcatggtcgcaaatattttactgatgttatctcctggcccctgatcctccagaagtttgctaacaaaaatggtggatatatggcgaacataatcagaaaattcgcgtaaattatcactgatatgctcttgttgctcgtgggtaacggcaatcaaacttatcaccccaacacaacgatcctgtaaaatgacaggcgtacccagaaatgctttttcgcggcaattttctttactatcgcaaccttcgcaaaggggatcgaagcgagactgtgtcacaactttttcagttttcgtttccaggacgtggcggagcaggcgactgttgccgctcaactggcgaccaagaaacttcccatacgcgcccgttccggcaacgcgacacaagttttcatcaacgatctcaacctcaagctgcaaaaacgctggcaagcattctggcaaaacgctgaattgtcggttgaatttgcatcaatacactctgcgtagtagcaagctccatagctttaccttccagacttacttaaaagtcgatcattgaagacgttgatggttcacagatcatgatgatattaactcaggcgaaattggctttgataaaaacataagatttttatcattttctaatgaaattatggaagagatatcacatttctatatcaatatgagaattacggcggtgagtttatcaaactgaagagagatagcctgcccctttatcttatttctgatacttagcagcaaataaataacgcgataaaaaaagccaaacgttttcgtattttacaaacaaccagaagctggcatcaatttgtgatcaaccccacacattatccgtcaaattagtcttttgcagccgcgcggataattctggcacacttattgttagtcccaggtatagctgtgaaaacaccaatcactttggcaagtcacagtgaaataaaccactttgcctgtcattccactaccgggactttatgatgaaaactgttaatgagctgattaaggatatcaatagcctgacctctcaccttcacgagaaagattttttgttaacgtgggaacagacgccagatgaactgaaacaagtactggacgttgccgcagcattaaaagcactgcgtgctgaaaacatcagtaccaaagtctttaatagtggattaggtatttccgtattccgcgacaactccacccgtacccgcttctcttatgcttccgcgcttaacctgctcggccttgcacaacaagatctcgacgaaggcaaaagtcaaatcgctcacggcgaaaccgtgcgtgaaaccgccaatatgatctccttctgcgccgacgctattggtattcgcgacgatatgtatctgggcgcaggcaacgcctatatgcgtgaagttggcgctgcacttgatgacggttacaagcagggtgtactgccacagcgtccggctttagtgaacctgcaatgcgatattgaccacccgactcagagtatggctgacctcgcgtggttacgtgaacactttggtagtctggaaaacctgaaaggtaaaaaaatcgccatgacctgggcctactctccaagctatggcaaaccgctctctgtaccacaaggcatcatcggtctgatgactcgcttcggtatggatgtcaccctggcccatccggaaggctacgacctgatcccggatgtggttgaagtggcgaaaaacaatgctaaagcctccggtggtagcttccgtcaggtcaccagcatggaagaagccttcaaagacgcagacatcgtttatccgaagagttgggcaccttacaaagtgatggaagagcgtactgaattgctgcgtgcgaacgatcacgaaggcttaaaagcactggaaaaacagtgtctggcacagaacgcgcaacacaaagactggcattgtactgaagagatgatggaactgacccgtgatggcgaagccctgtacatgcactgcctgccagctgatatcagcggcgtatcctgtaaagaaggtgaagtgactgaaggcgtattcgaaaaataccgtatcgctacctacaaagaagccagctggaagccttatatcatcgccgcgatgatcctgtcccgtaaatacgccaaaccaggtgcactgctcgagcaactgctgaaagaagcgcaagaacgcgtgaaataacccctcgggccgatcagctggtcggccctctatttccagaggccaaaaggataggatatgtccgttttcagtttgaagattgatatcgccgataacaaatttttcaacggcgaaacaagtccgctctttagccaaagccaggccaaactggcgcgccagttccaccagaaaatagctggttatcgcccaacaccgctttgtgcgctggacgatctcgcaaacctttttggtgtgaagaaaattctcgtcaaagacgaaagtaaacgattcggtctgaacgccttcaaaatgcttggcggtgcgtacgccatcgctcaattattgtgtgaaaaatatcatcttgatatcgaaacgctgagttttgagcacctgaaaaatgccatcggcgaaaaaatgactttcgcgaccaccaccgacggcaaccacgggcgcggtgtggcgtgggcagcacagcaactcggacagaatgcggtgatttacatgccgaaaggttctgctcaggaacgcgttgacgccattctgaacctcggtgccgagtgcatcgtcacggatatgaactatgacgataccgttcgcctgaccatgcaacacgcgcagcagcacggctgggaagtggtacaggacacggcatgggaaggttacaccaaaatcccaacctggatcatgcaaggctacgcaaccctggcagatgaagccgtcgagcaaatgcgtgaaatgggcgtaaccccgacgcacgttctgctgcaagccggtgtcggagcaatggccggtggtgtgctgggttatctggtcgacgtctatagcccgcaaaatctgcacagcattattgttgaacctgacaaagctgactgtatttatcgctccggcgtcaaaggcgacatcgtcaacgttggcggtgatatggccaccatcatggcaggcctggcctgtggcgaacctaacccgctgggctgggaaatcctacgtaactgcgccacccaattcatctcctgccaggacagcgttgccgcattaggtatgcgcgtgctgggtaatccgtacggcaacgacccgcgcatcatctccggtgaatccggcgctgtcggtttgggcgttctcgcagcggttcattatcacccgcaacgtcaaagcctgatggaaaaactggcgctgaacaaagatgccgtggtgctggttatcagcactgaaggcgacaccgacgtgaagcactaccgcgaagttgtctgggaaggcaaacacgctgtagcaccttaatcaccctattggaactgctccctgcaaaacggggagtaaaaaatctggagaaaaataatggctaagaatattccattcaaactgattcttgaaaaagcaaaagattaccaggcggatatgactcgcttcctgcgcgacatggttgctattcccagtgaaagctgcgacgagaaacgcgtagtacatcgtattaaagaagagatggaaaaagtcggcttcgataaagttgaaatcgacccgatgggcaacgttctcggttatatcggccacggcccgcgtctggtggcaatggacgctcatatcgataccgtcggcattggcaacatcaaaaactgggacttcgatccgtacgaaggcatggaaactgatgaactgattggtggtcgcggtacttccgaccaggaaggtggcatggcctctatggtttatgccggtaaaatcattaaagacctcggtctggaagatgaatataccctgctggttaccggtacggtgcaggaagaagactgcgacggtctgtgctggcagtacattattgaacaatccggcattcgcccggaatttgtggtcagtaccgaaccaaccgactgccaggtataccgtggtcagcgcggtcgtatggaaattcgtattgatgttcagggtgttagctgccacggttctgcaccagaacgcggtgataacgccattttcaaaatgggtccgattcttggcgaattacaagaactctcccaacgtctgggttatgacgaattcctcggcaaaggcaccctcaccgtttctgaaatcttcttcacatccccaagccgttgcgctgtagcagacagctgcgcagttagtatcgaccgtcgtctgacctggggcgaaacctgggaaggcgcgctggacgaaatccgcgccctgcctgcagtacagaaagctaacgcggttgtttctatgtacaactacgaccgtccgtcctggactggcctggtttacccaaccgaatgctacttcccgacctggaaagtggaagaagatcacttcaccgttaaagcactggtgaatgcctacgaagggctgtttggcaaagcgccggttgttgataagtggaccttcagtactaacggcgtatctatcatgggccgtcacggcattccggtgatcggctttggcccgggtaaagaacctgaagcgcatgcacctaacgaaaaaacctggaaatctcacctggtgacctgtgccgcgatgtacgctgcaatcccgttaagctggctggcaacagagtaattactcttcacttattcccctccggttcgccggagggtttttggagtttgctatgcgcgtattgatcaaaaacggcactgtcgttaacgcagatggacaagccaaacaggatttgctgattgaaagcgggattgttcgccagttgggcaacaatattagcccgcagctcccgtatgaagaaattgatgccactggctgttacgttttccctggcggcgtggatgtccatacgcatttcaatattgatgtcggcatcgcgcgcagttgtgatgatttttttaccggtacccgcgcagctgcgtgtggcggtacaacaaccattattgaccatatgggatttggcccaaacggctgtcggttacgccatcaactggaggtttatcgtggttatgccgcccataaagcggtcatcgattacagctttcacggtgtgatccagcacattaatcacgcaatcctcgacgaaatcccgatgatagtcgaggaaggactgagcagttttaaactctatttaacctatcaatacaaactcaacgatgacgaggttttgcaggcattacgccgcttgcatgaatccggcgcgctgaccaccgtgcacccggaaaatgatgcggctatcgccagcaagcgggcggaatttatcgccgcagggttaaccgcgccgcgctatcatgccttgagtcgccctctggaatgcgaagcggaagccatcgcccgcatgattaacctggcacaaattgccggtaacgccccgctctatatcgtgcacctgtctaacggcttaggtctggattatctgcgtcttgcccgtgcgaatcaccagccagtctgggttgaaacctgcccacaatatctcctgttggacgaacgcagttacgatacagaagatggcatgaagttcattcttagcccaccgctgcgtaacgtacgcgagcaggacaaactgtggtgtggcatcagcgatggtgcgattgacgtggtggcaaccgatcactgcaccttcagcatggctcaacgcctgcaaatttctaaaggcgatttcagtcgctgcccaaatggcttacccggtgtggaaaaccgcatgcagttactgttttccagtggcgtgatgacgggacgtataacaccggaacgctttgttgaattaaccagcgcaatgcccgccaggttgtttggcctgtggccgcaaaaaggattattagcgcccggttccgacggcgacgtggtgattatcgacccacgtcagagccaacaaattcagcatcgccatctccacgacaacgccgactacagcccatgggagggttttacctgtcagggcgcgattgtcagaaccttatcccgtggtgaaacgattttctgtgacggcacctttacaggcaaagccgggcgaggtcgtttcctgcgacgcaaaccgtttgtccctcccgtgctctaaccactgccagggatctatacacaatcaagaatgatgagtgaggaaaaatgagtaagaaaattgttctcgccctgggcgggaatgcgctgggcgatgacctggccgggcaaatgaaagcggtaaaaattacttctcaggcaattgttgatttaattgcccagggacatgaagttatcgtcactcatggtaacgggccgcaggtgggcatgattaaccaggcctttgaagctgccgcaaaaactgaagcgcacagcccaatgctgccgatgtctgtctgtgttgcattaagccagggttatattggttacgatctacaaaacgctttaagagaagaactgctttctcggggcattaataaacctgtagcaacgctggttactcaggtcgaagtcgacgctaacgatccggcattcctcaacccgaccaagccgatcggtagcttctttaccgagcaagaagcagagcaactgacaaaacagggttacactctgaaagaagatgctggtcgcggctatcgccgtgttgttgccagcccaaaaccggttgatatcattgaaaaagaaacggttaaagctctggtagatgcaggtcaggtggtgatcaccgttggcggtggtggtatccctgttattcgtgaaggtaaccatctgcgtggtgccagcgcggttatcgataaagactgggccagcgcccgtttagcagaaatgattgatgccgatatgctgatcattctgactgcggtagaaaaagtggccattaacttcggtaaagagaatgaacagtggctcgatcgcctgagtttaagtgatgctgaacgctttatcgaagaaggtcattttgcgaaaggttctatgctgcctaaagtggaagctgccgccagctttgctcgctctcgcgcaggtcgtgaagcactgattaccgtattgagcaaagcgaaagaagggattgaaggcaaaacaggaacggtgatttgtcagtaatttaaaggccgggtgggtaataccatccggccaaagattgtcaagtaagtgcgctttgttgatgccggatgcggcgcgagcgccttatccgtcctacaaaacatcgcaaattcaatagattgcaatgcacttgtaggcctgataagcgtagcgcatcaggcaatttggcgtttgtcatcagtctcaggccgggtgggtaataccatccggccattttcatttaagccacttccagcacttcttttgtcgctttcacgccctgatgcatcaacatcattaacgcctcaagtacgccgccgccaatcgcccgggctttatcagaaacgctggtgaaatcagcggtttcaccacgaggatcgatatcaccaattttaaaaccaccaaccactgccaggccgtcgttcaacaagccacgcaccatccccgtcaacggtgctttaatttcatgctcaccaatccaggcaatcacatcgccctctttcaccagatcgcctaatttcacgttggatcgcataatgcctgcagcaggagcacggatcacccgtcgggtggtatgccccataatattgccaggaacaccggtattctcctgcgcacaaccagagtaaatcacctgaccgagccagtgcccgcgatttgtttcaattaccgcatgacaatccttcccagcagtaaagcccggcccaagcgcgattgttactggtgccatatctgcccgcgttcccaaattctgtttcgccagaatagcgtccaccacgcaaagcggtttcagttcatcaagcaaactacaggcgggatctaccatcacaggaatgaatccgcgttcggtaagtttcatcgcttccgcagagctggttgccaggcgagcagtgacgccttcgaccgtcatttcgccatcgaacacggcctgggcaaacgccacggtacaacgaatcactgtcggtttttccacttccagcatgatcactttaaaacccgcatgatacagacgtagcgccacaccactggcgatatctcccgcaccgcgaatcaccaccagctggtgtccggaaggatgagaaggtttcatcatcagcccacccggcgcgttatttttcacctgtaatatttctgccagcacgctgatggcgatctcctgcggcgtttccgcacctatgttgtaaccaacgggcgcatgtaaacgggcaatatgttcttcagccacgcctttctcacgcaattgacgcaggaaaagctgaaccttgcgacgacttgccagcaaccccaaccatgcaatgggctgttcaatgagtttgtcgagggcttcacgatcctgattattcgtggcaatcaggacaaaattatcagggcgaatatccagtgcttccactgccgcaccaaagctctcagcatggagaagcgtggtacttggtgggaatagttcaggattgaggctttcgcgataaatatcagcaacggcaatatcaaatcctaatagcgccgcactctgggctatcgcccggttgacatgccccgcgccaatcaacaccagacgtggacgcataccatggacgctgataaatacactcattgcacctccacaatcactcccgacagcatccgcaccgttacgagccatacgtccatggaataatcgcggcttacgttcctgcaatgcctgaaggctctcttcaatcaccttccgctcaaccattccgccaccaattgtaccgacgatagaaccatcggcgcgcactaacatttgtgcagaatggcggggagtgctgcctcggctatcaacaatttgcgccatagcaaacggacaattttgctcttcgagttttgcagcctctgtgaaaatattcataccaacctcaatggatatcctttcagtaacccggaatacccgggccgttaattcacaaatctgcgcgcgattgcaggatgttcttgtatatcgcccagccagattgcctctacgtcgtgttgttgcagcggttgaaggagctcgctttgtgcaatcgcattctcacattgagaaaaacggttaatgaaccagactcgccgacaaccttgcggtacgtttttaaacgccccctgagggtggcgaaccagcgcaacgagatcgctcagttgcaaggttgcatcaggtgttaacccggtaatatcagcaaactggctccagcgatggacattttctgtgctcactttcgcgcccaaagtatgtcctcccatcacagcaatcacgcagcaactgcttttgggtatgcaaggttcgtgctcatcaggcgcttttaacggcattccacggctgccatctgcttcaatgagaattacgtcacactctggtcgttgcaccagtgcatcaatcgcttctggcgtaaatccctgcacttttccctggttcgctttccagctgtgaaaacaaaaactaatgggggatgtaagagacgcatgaggaagcatggcgggatcacgacagaaaaccacgggccagtgagacgttggcataaacatatgtgtcgtcgtcgtgattaacacacgcctgccgctagcctggagcagttctgccagccaaaaaagcaagctggttttccccccagcaccaacaacagaaatcacagtgggacgtttctgcgcacctaaatcaatgactaatgcgcttgggtcaactatacttttcacgagtctttatgacctctctgggataaattatccccaacttaatccatcaggaagtaacgcaattatcaggcgttattagcccctataaataatggaaccactatgagtgccatcgactgtataattaccgctgccggattaagtagtagaatggggcaatggaaaatgatgttaccctgggaacagggaacaattcttgatacaagtatcaaaaatgcgttgcagttttgtagccgaattattttagtcaccggctatcgtggtaatgaactgcacgaacgttatgcgaaccagagcaatatcactattattcacaacccagattatgcgcagggtttactaacatccgtcaaggccgcagtacccgcagtgcaaacagaacattgttttctcacccacggtgacatgccaaccctcaccatcgatatttttagaaaaatctggagcttacgaaatgatggcgcaatactgccactccataatggcatccccggccatccgattttagtgagtaaaccatgcctgatgcaggcaatccaacgacccaatgtcaccaatatgcgtcaggcactccttatgggagatcattattccgtcgaaatagaaaatgcagaaataattttagatattgatactccggacgactttattacagcgaaggaaaggtatactgaaatttaaaaaacgtagttaaacgattgcgttcaaatatttaatccttccggcactcattatcataatgataaggaatcactgattttgagaaaagagaaaaattgataaatgggctggcaataataattttcaggagtgattttaattctcatttagcacctgtgagttcattcacaaaaagcccttaagtttcgagccgcctcacatttttttatatttcccgccaaacctggcaagagtggtgcgattgttgctctatccccctaaaccaccggatttctcaacaccggtcactcaatgatatctgtataagctaaggagagggttatgggggatattatgcgtcccattccgtttgaggaacttttgacgcgcatatttgatgaataccaacaacaacgcagtatctttggtattcccgagcaacagttttacagtcctgtaaaaggtaaaactgttagcgtcttcggtgaaacctgtgccactcccgtcggccctgccgctggcccgcacacgcagctcgcgcaaaatattgtcacttcctggctgactggcggacgcttcatcgaactaaaaaccgtccaaattcttgaccgcctggagctggaaaagccctgtatcgatgccgaagacgagtgctttaacaccgaatggtctaccgagtttaccctgcttaaagcctgggatgaatacctcaaagcctggtttgccctgcaccttctcgaagcgatgttccagccttctgattccggtaaaagcttcatctttaatatgagcgtcggttacaacctcgaaggtattaagcaaccgccgatgcaacagttcatcgacaatatgatggacgcatctgaccatccgaaattcgctcaatatcgcgatacgctgaataaattactccaggatgacgcatttttagctcgccacggattgcaggaaaaacgcgaaagcttgcaagccttacccgctcgcatccccaccagtatggtgcatggcgtcaccctctccaccatgcacggctgtcctccgcatgaaatcgaagccatttgccgctacatgctggaagaaaaagggctcaacacctttgtgaaacttaacccgaccttactggggtacgcgcgtgttcgtgagatcctcgatgtctgcggtttcggttacataggcttaaaagaagagagttttgatcacgacctcaagctgacgcaagcactggaaatgctggaacgcctgatggcactggcaaaagaaaaaagtctcggctttggcgtaaaactgactaacactctcggcaccatcaacaataaaggcgcactgcctggtgaagagatgtatatgagtggccgtgcgctgttcccgctctccatcaatgttgcagcagttctctctcgcgcctttgacggcaaactgcccatttcttattccggtggtgccagtcagctgactatccgcgatatttttgatacaggtattcgccctattactatggcaaccgacctgctgaaacctggcggctatctgcgcttaagtgcctgcatgcgcgagctggaaggctccgacgcctggggacttgaccatgttgacgtcgaacgactgaacagactggcagcagatgcgttaaccatggaatacacccagaaacactggaagccagaagagcgtattgaagtggcagaagacctgccgctgaccgactgctacgttgccccctgtgttactgcctgcgctatcaagcaagatattccggaatacatccgtctgcttggcgaacaccgctatgccgacgcgctggaactcatctaccaacgcaacgctctgcccgccattaccggtcatatttgcgatcaccagtgccaatacaactgtacccgcctggattacgacagtgcgctgaatatccgcgaactgaaaaaagtcgcgctggaaaaaggttgggatgaatataagcaacgctggcacaaaccagccggttctggtagtcgccatccggttgccgtgattggtgcaggtccggcgggtctggcagcaggttacttccttgccagagcgggccatccggttacgctgtttgaacgcgaagccaatgcgggcggcgtggtgaaaaatatcattcctcagttccgtattcctgcagagttaattcagcacgatatcgattttgttgccgctcacggcgtgaaatttgagtatggctgcagtcccgatttaaccattgagcagttaaaaaatcagggcttccactatgttctgattgccaccggcactgataaaaatagcggtgtgaaactggcgggcgacaaccaaaatgtctggaaaagtctccccttcctgcgtgaatacaacaagggtacagcgctcaagctgggcaaacatgtggtcgttgtcggggcgggtaacaccgcaatggactgcgctcgtgcggcgttacgcgttccaggcgtagaaaaagcaacgatcgtttaccgtcgtagtctacaagagatgcccgcatggcgcgaagagtatgaagaagcgttgcacgacggcgtagagttccgtttcctgaataatccggaacgtttcgatgctgatggcaccttaaccttgcgcgttatgagccttggcgaaccggatgagaaaggtcgtcgtcgtccggttgaaaccaatgaaacagtaacactgcttgtagacagcctgatcaccgccattggtgaacagcaggatactgaagccctgaatgcgatgggcgtgccgctggacaaaaacggctggccagacgtcgaccataatggcgaaactcgtctgactgacgtctttatgatcggcgacgtacagcgcggaccatcctccattgtcgctgctgtcggaaccgcgcgtcgggcgaccgatgccatccttagtcgggaaaatatccgttcccaccagaacgataaatactggaacaacgtcaatccagcggaaatctatcaacgtaaaggcgatatctctatcacgctggtgaacagtgacgatcgtgacgcgtttgtcgcccaggaagccgctcgctgcctcgaatgtaactacgtttgcagcaagtgtgtggatgtctgcccgaaccgcgccaacgtctccattgcggtcccaggcttccagaaccgtttccagacgctgcacctcgacgcttactgtaacgaatgcggcaactgcgctcagttctgtccgtggaacggtaaaccgtacaaagacaaaatcaccgtcttcagcctggcgcaagactttgataacagcagcaacccaggcttccttgtggaagattgccgggtacgagtacgtctgaataaccaaagctgggtgttaaacatcgacagcaaaggtcagtttaacaacgtaccaccggagctgaacgatatgtgccgcatcatcagccatgtccaccagcatcatcattatctgctgggccgcgtggaggtgtaatcatgttgattctgaagaatgtcactgcggtacagctacacccggcaaaagtgcaggaaggcgttgatatcgccatcgaaaacgatgtgattgtcgctatcggcgatgccctgacgcaacgctaccccgacgccagcttcaaagagatgcatggccggattgtgatgccagggattgtctgcagccacaaccatttttacagcgggctttcccgcggaattatggcaaacatcgcccctttgcccggatttcatcagtacgctgaaaaatctctggtggcggctcgatcgcgcccttgatgaagagagcctctattacagcggactgatttgttccctggaagcgattaagagcggatgtacaagcgttatcgatcaccatgcctctccggcgtatatcggcgggagactctccacattgcgcgacgcatttttaaaagttggcctgcgcgcgatgacctgttttgaaactactgaccgtaacaacggcatcaaagagttgcaggaaggtgtagaagaaaacatccgtttcgcccgtttgattgatgaggcgaagaaagcgacaagcgagccgtatctggtggaagcacatatcggtgctcacgcgccgtttaccgtgccggatgccggtctggagatgctgcgtgaagccgtgaaagccacaggccgtggtttgcatattcacgctgcggaagacctttacgacgtttcctacagtcaccactggtacggcaaagacctgctggcacgactggcgcaattcgatctcatcgacagcaaaacgctggtcgctcatgggctgtacttgagcaaagatgacatcaccctactcaatcagcgcgatgcgttcctggtgcataacgcccgtagtaacatgaacaaccatgtcggctacaaccatcaccttagcgacatccgcaatctggcgttgggaacggacggcattggtagcgacatgtttgaagagatgaaatttgccttctttaaacatcgcgatgcgggtggtccgctgtggcctgacagttttgccaaagccctgactaacggtaacgaactgatgagccgcaactttggcgcgaaatttgggcttctggaagccggttacaaagctgatttaaccatttgcgattacaacagcccgacgccgctgctggcagacaatatcgccgggcatatcgctttcggtatgggcagtggcagcgttcacagcgtgatggtcaatggtgtgatggtctatgaagaccgtcagtttaacttcgattgcgattccatttatgcacaagccagaaaagccgctgccagtatgtggcgtcggatggatgcgctggcataaatgacagatgccctcttcccgcagggaagagggttaaataaggaaagaagatgattgaacaatttttcaggcccgactctgtcgaacaggcgctggaactgaagcgccgctaccaggatgaagccgtctggttcgccgggggcagcaaactcaatgctacaccaacccgtaccgataaaaagattgccatttccttacaggatctggaactggactgggttgactgggataacggtgcactgcggattggcgcaatgtctcgcttgcagccactgcgtgatgcgcgatttattcctgcagcgctgcgtgaagccctcggttttgtttacagtcgccatgttcgtaatcagagcaccattggtggtgaaatcgccgcccgccaggaagagagcgtgctgcttcccgtcctgttggcactggatgctgaactggtttttggcaacggcgaaacgctgagtatcgaggactacctggcctgcccatgcgatcgcctgctaaccgaaattatcattaaagatccgtatcgcacctgtgcgacccgcaaaattagccgttctcaggcaggtttaaccgtcgtgacggcagccgttgcaatgacagaccacgacggtatgcgaattgcgctggatggcgtcgccagtaaagcactgcgtctgcatgatgtcgaaaaacaaaatctggaaggcaatgcacttgaacaggctgtcgccaacgccattttcccgcaggaagatttgcggggcagcgtggcctataaacgctatatcacgggagttctggtagccgacctgtatgccgactgccaacaggctggggaggaagccgtatgatcatccactttactttaaatggcgcgcctcaggagctaaccgttaatccaggcgaaaacgtgcaaaagctgttgtttaacatgggaatgcactctgtacgcaacagtgatgatggtttcgggtttgccggttctgacgcaataatctttaacggtaatatcgttaacgcgtccttgcttattgccgcacagttagagaaggcagatattcgtaccgcagaatctctgggcaaatggaacgagttaagtctggttcaacaggcaatggttgatgttggcgtggtgcagtctggttataacgatccagctgcagctctgattatcaccgatcttctcgatcgcatcgccgcacctacccgcgaagagatcgacgacgcgctttctggtttgttcagccgcgatgctggctggcagcaatactatcaggtcattgaactggcggttgcacgtaaaaataatccgcaggccaccattgatatcgctccgactttccgtgacgacctagaagtcattggtaagcattatcctaaaactgatgccgcgaaaatggtgcaggcgaaaccctgctatgttgaagaccgcgtaacggctgacgcctgcgtcattaaaatgttacgtagcccacacgctcacgcactgattactcatctggatgtcagcaaagctgaagccttaccgggcgtcgttcacgttattactcacctgaattgcccggatatctactataccccgggtggtcagagcgcaccggaaccgagtccgcttgaccgccgtatgttcggcaagaaaatgcgtcacgtcggcgatcgtgttgctgcggtcgtcgcagaaagtgaagaaattgcgctcgaagcactgaagctcatcgacgttgaatatgaagtgcttaagccggtaatgagcatcgacgaagcaatggcggaagatgcgcctgtcgtgcacgatgaaccggtggtgtatgttgctggtgcgccagatactctggaagacgataacagccatgcagcccagcgcggcgagcatatgatcatcaacttcccgatcggttctcgccctcgcaaaaatatcgccgccagtattcatggtcatattggcgatatggacaaaggctttgccgatgccgatgtgatcattgagcgaacctataacagtacgcaagcgcagcagtgcccgactgaaacacatatctgctttactcgtatggacggcgatcgtctggttatccacgcctccacccaggtaccatggcacttacgccgccaggtcgcgcgcctcgtgggcatgaaacagcataaagttcatgtcattaaagagcgagttggcggcggttttggttccaaacaggacatcctgctggaagaagtgtgcgcctgggcaacctgcgtgaccgggcgtccggtactgttccgctacacccgtgaagaagagtttattgctaacacctctcgtcacgtcgcgaaagtcaccgtcaaactgggagcgaaaaaagatggtcgcctgacggcagtgaagatggatttccgcgccaacactggcccttacggcaaccacagtctcaccgtaccgtgtaacggaccggcgctgagcctgccgttatatccgtgcgataacgtcgatttccaggtcaccacctactacagcaacatttgcccaaatggtgcttatcagggttatggcgcaccgaaaggtaacttcgctatcaccatggcattagcggaactggctgaacagttacagatcgaccaactggaaattatcgaacgtaaccgggtacacgaagggcaagagctgaaaattctcggtgcaatcggtgaaggtaaagcgccgacctccgttccttccgccgccagctgtgcactggaagagatcctgcgtcagggtcgcgagatgatccaatggagcagtccgaaaccgcaaaatggtgactggcacatcggtcgcggcgtcgccattatcatgcagaaaagcggtatcccggatatcgatcaggctaactgcatgatcaaactggaaagcgacggcacctttatcgttcattctggcggtgcggatattggtactggtctggatactgtagtgacgaaactggcagcagaagtgctgcactgcccaccgcaggacgtgcatgttatctccggtgataccgatcatgcgttgtttgataaaggcgcatatgccagctccggtacttgcttcagcggtaacgcggcgcgtttggcagcggaaaatctacgggagaaaattctgttccacggcgcgcaaatgttgggtgagccagtggcagatgttcaactggcaacgccgggcgtcgtgcgcggcaagaaaggcgaagttagtttcggggatattgcccataaaggcgaaaccggcaccggctttggtagtctggtgggaactggcagttatatcacgcctgatttcgccttcccgtatggcgcaaacttcgctgaagttgccgtcaacacgcgtacgggtgaaatccgcctggataaattctacgccttgctggactgcggtacaccggtcaatccagagttagcgttgggacaaatctacggtgccaccctgcgtgctatcggccacagtatgagcgaagagatcatttatgacgccgaaggtcacccgttaacgcgtgatttacgcagttacggcgcaccgaaaattggtgacattccgcgtgatttccgcgctgtgctggtgccgagcgacgataaagtcggcccgttcggggcgaaaagcatcagcgaaatcggtgtaaatggcgcagctccggcgattgctaccgcaattcacgatgcatgcggcatctggttacgcgaatggcatttcacaccggagaaaatactcactgcgctggaaaaaatataaataataaatggccgcttcggcggcctgtttctctgtttgaacgatgactaaatagtgactgcgaaaatgagataagccgttctcaaggcgtcctgcgccccaaattcgtgggaatttattttactaattcagatgatcaaatttactttaaaaggagtgaagggatgtctgatataaaccatgcaggttctgaccttatatttgaactggaggatcgccctccctttcatcaggctctcgttggtgccattacccatctgttggcaattttcgttccgatggtaacccccgcgttaatcgtgggtgcggccttacagctttccgctgaaacaactgcctatcttgtttctatggcgatgatcgcctctggtattggtacctggttacaagtaaaccgctacggcatcgtcggttctggcctactcagtattcagagtgtcaattttagttttgttacggtcatgattgcgctgggcagcagcatgaaaagcgacggttttcacgaagagttaatcatgagcagccttctcggcgtctccttcgttggcgcatttctggttgtcggatctagttttatcttgccctatttacgtcgggttattacgcctaccgtcagcggtattgtggtactgatgatcggcttaagcctgattaaagtcggcattatcgattttggtggaggatttgcagccaaaagcagcggtacgttcggcaattacgaacatctcggcgttggtttattggttttaattgtggtgatcggctttaactgctgtcgcagtccgttgctacgcatgggagggatcgccattgggctatgtgtcggctatatcgcaagcttatgcctgggcatggtggatttcagcagtatgcgcaatttgccgttaatcaccatcccgcatccgttcaaatacggctttagttttagcttccatcagttcctggtggttggcacgatttatctgcttagcgtgctggaagcagtcggcgatatcaccgccacggcaatggtttcccgccgccccattcagggggaagagtatcagtcccggctgaaaggcggcgtgctggcagatggtctggtttctgttatcgcctccgctgtcggtagtttaccattaaccacgtttgcgcaaaataatggggttattcagatgactggcgtcgctagtcgttatgtcgggcgaaccatcgcggtaatgctggttatcctcggcttatttccgatgattggcggcttcttcacgaccattcccagcgcagttctgggaggcgcaatgacgttgatgttttccatgattgccatcgcagggattcgcatcatcatcaccaacggtttaaagcgccgtgaaacacttattgtcgccacttctttaggtttagggcttggcgtctcctacgatcccgaaatttttaaaatattgccagcctctatttatgtattagttgaaaaccctatttgtgctggcgggttaactgcgattttattaaatattatcctccctggtggctaccgacaggaaaacgttctgcctggtattaccagtgcggaagagatggattaacagtaaaggagtcaatgatgagtggagaacacacgttaaaagcggtacgaggcagttttattgatgtcacccgtacgatcgataacccggaagagattgcctctgcgctgcggtttattgaggatggtttattactcattaaacagggaaaagtggaatggtttggcgaatgggaaaacggaaagcatcaaattcctgacaccattcgcgtgcgcgactatcgcggcaaactgatagtaccgggctttgtcgatacacatatccattatccgcaaagtgaaatggtgggggcctatggtgagcaattgctggagtggttgaataaacacaccttccctactgaacgtcgttatgaggatttagagtacgcccgcgaaatgagcgcgttcttcatcaagcagcttttacgtaacggaaccaccacggcgctggtgtttggcactgttcatccgcaatctgttgatgcgctgtttgaagccgccagtcatatcaatatgcgtatgattgccggtaaggtgatgatggaccgcaacgcaccggattatctgctcgacactgccgaaagcagctatcaccaaagcaaagaactgatcgaacgctggcacaaaaatggtcgtctgctatatgcgattacgccacgcttcgccccgaccagttctcctgaacagatggcgatggcgcaacgcctgaaagaagaatatccggatacgtgggtacatacccatctctgtgaaaacaaagatgaaattgcctgggtgaaaagcctttatcctgaccatgatggttatctggatgtttaccatcagtacggcctgaccggtaaaaactgtgtctttgctcactgcgtccatctcgaagaaaaagagtgggatcgtctcagcgaaaccaaatccagcattgctttctgtccgacctccaacctttacctcggcagcggcttattcaacttgaaaaaagcatggcagaagaaagttaaagtgggcatgggaacggatatcggtgccggaaccactttcaacatgctgcaaacgctgaacgaagcctacaaagtattgcaattacaaggctatcgcctcagcgcatatgaagcgttttacctggccacgctcggcggagcgaaatctctgggccttgacgatttgattggcaactttttacctggcaaagaggctgatttcgtggtgatggaacccaccgccactccgctacagcagctgcgctatgacaactctgtttctttagtcgacaaattgttcgtgatgatgacgttgggcgatgaccgtagcatctaccgcacctacgttgatggtcgtctggtgtacgaacgcaactaataataaaactttaacatcctcgtgaggacatcattatgtctggagacatcctacaaacaccggacgcaccaaagccacagggcgcgctggataattattttaaaattaccgctcgtggcagtaccgttcgtcaggaagtactggctggcttaacgacctttctggccatggtttattccgttatcgtcgttccgggaatgctgggcaaagcaggttttcctcccgcagctgtgtttgttgccacctgtctggtcgcgggcttcggcagcttgctgatgggattatgggctaatttgccaatggcgattggttgcgcgatttccttgacggcgtttaccgcattcagtctggtactcgggcaacaaattagcgttcctgtcgcactgggcgcggtatttctgatgggcgtcatcttcaccgccatttccgtaaccggtgtgcgtacctggatcttacgtaatttgccgatgggtatcgctcacggtacaggtatcggtatcgggctgtttctgctgctgattgctgctaacggtgtgggtatggttatcaaaaacccgattgaaggcttgccagtggcgctcggtgcgtttacctccttcccggtgatgatgagcttgctggggctggcggtcatcttcggcctggagaagtgtcgcgtacccggcgggatcttgttggtgattattgcaattagcatcatcggcttaatctttgacccagcggtgaaataccacggtctggtggcgatgccaagcctgactggcgaagatggtaagtctctgattttcagcctcgatattatgggtgcactccagccaactgtacttccgagtgtactggcattggtgatgaccgcagtgttcgacgctactggcaccatccgtgccgtcgccggtcaggcgaatttgttggataaagacaaccagatcatcaacggcggcaaagccctgaccagtgacagtgtaagtagtatattctccggcctggtgggcgcagcgcccgcagcggtttatatcgaaagtgcggcaggaaccgccgccgggggtaaaacaggtttaaccgcaaccgtagtgggggcgttattcctgttaattctgtttttaagtccgctgagttttttgatccctggttacgccactgcacccgctctgatgtacgtaggtttgctgatgttaagtaacgtcagcaagctggatttcaatgattttattgacgctatggctggcctggtgtgtgccgtgttcatcgttctgacttgtaatatcgttaccggtattatgctgggctttgtgacactggtcgtaggccgcgtctttgcacgcgaatggcaaaagctgaatattggtacggtgatcattactgccgcactggtcgcattttacgcgggtggttgggcaatctaatagattctccgcgcctttcagcgcggagatttctttcagagaggattctcaccgctggcaacaatacgctgctggcggactcgcctgagttctctttcagtaagcaactgcagcgcctgtgttgggcaagattcaacgcaggctggcccctcttcccgctgttcacagagatcgcatttcacaatttgttgtcgggtatcccccggcaagctctgaatggtgatcattccaaacgggcacgcactgacgcaactctgacagccaatacaacgggcagaattggtctgcaccacctgctcgcccatcgtcagcgcccccacggggcaagcgccaacacaaggggcgttttcacactgatggcacatcaccggcgcactgatgctgtccagtcgctgtaccttcagccggggtaaaaagacatcggcattcaactcctgttcactagggtgagcgaccacacaggctacttcacaagtacggcagccaatacagtcagccggattaacgataattaagcttttcatcagcttgccttcgtatcaaacagagttaacatatcgcgcgccgcctgccttcctgcggccattgcagtgacaaccagatccgcgccatgaactgcatcaccaccagcaaagacttttttcagatgcgtctgggtaggtaaatacccgacgtcaccggtttgaatcaggccccatttatcgagtttaattccgctgccctgcaaccacggcatggcatgcgcctggaaaccaaaggccataatcagaacatcggcgggcaattcaaactcactacccgctaccggacgaggacgacggcgaccatccggccccggctcacccatggcggtacgaatcaggcccaccgcagttaaacgcccatcttcgtcacaagcgatatattgcggttgaacattgaactgaaactcgacaccttcctcgcgcgcattaaccacctctttgcggctgcccggcatactgacttcatcacgacgatacgcgcaggtcacgctggcggcattgaggcggatggaagtccgcaaacaatccattgtcgtatcgccaccgcccaataccacgactcgcttaccttccacgtccgtcagcggatactcttcagactccggcaatcccatgagctggcgggtatgggcagtcaggaacggtagagcctgaatgacaccgggcgcatcttcatgcggcagatctgctcgcatcatcccgtaagtccccacgccgatgaaaactgcatcatattcagaagttaaatcgctaaaggtaatatcgcggccaatttcacagttaagatgaaagtcgattcccattgcggtgaatatctctcgccgctggcttaataccgttttatcgagtttgaaaggaggaatgccaaaagtcagcataccgccaatttctggatggcgatcaaagacatcgacctgaactcctgcgcgcgccagaatatcagcacaccctaaccctgcaggcccagcgccaatcaccgccactttttcgctacggggaacaactttgctgacatcgggacgccaacccatcgccagcgcggtatcggtgatgtagcgttccagattaccgatagagactgcgccgctgtgatctttcaaagtacatgcgccttcacaaagacggtcctgtggacataccctgccgcaaatttctggtaaggaactggtctggtggcaaagttctgccgcttcaataatctttccttcctgtaccagacggatgtaatccggaatagcgttatgcagcgggcaatgccagttgcagttagctttttcggcacaataaacacagcggtcactctcataagtcgcttgttgtggatccagcccgcaatatatttcgccaaagtgggttttccgttcactcgcactaattttatctgcgcctttacggctgttaacggggagcaacgctgcactgcgagatggctgagcgtcactactcgcttttcctgctgccgttttgcgctggcgggccacctttatctgctgcaaccctttatcgtccatcagtcgtaacgcctgtgttgggcaaacttcaatacaggcttgcgtgccggaactgcgctggttacaaaggtcgcatttctgcgcaatcgtatcgaccatctcaacgacgccaaaggggcaagcgattgcgcatcttttacaaccaatacatttttgctcgtccagttgtacgctatcggactggaaagtcagagcattaaccggacaagccgtaacgcaaggggcattgttgcagtgatggcaggccaccggattcgcagcctggcctttccctacaacgtggatacgcggtcgaaagtcactgtgactcagcggccagttttcttgattgtgtgccaccgcacaggcaatttcacaagcatgacagcctatacattccgcagcttcagcagcaataaacttattcatttgcatccctttcatttaatgagttatgtcttctcaaatttcgcgatgcaataaacgggcatatattaggtagcatgaccgttttaattataattttgcgactgagttcaaattattgcccctcaatctatgccgctttcattatttcaacattgccgatcaaaagagcgctatccagataaaaacgattaaatgcgagagtgcgacatgccagaatgattaatgaaatatcaatatgagaaaattacagataattccattgtcaggttctcttctcattttcgtggtttaaccacgattatgtgattgcctccgcaattcctgtctctaactccccttcctcgcaaaaactggcactccacgagcatgtgtttagacagtttcattaacgtaaacggttgctttttactctggcgggcgaaaggagaaacactgatgagcgccatagattcccaacttcccagttcttctgggcaagaccgcccaactgatgaggttgaccgcatattaagtccaggaaagctgatcatactcggtctgcaacacgtccttgtcatgtacgcaggtgcagtcgctgttcctcttatgattggtgaccgactgggcctcagtaaagaagctattgcgatgctcattagcagcgatctcttttgctgcgggatcgtcacattattgcaatgtatcggtatcggccgctttatggggatccgcctgccggtgattatgagcgtgacctttgctgctgtaacaccaatgatagccattgggatgaacccggatatcggcctgctggggatatttggtgccactatcgccgcgggttttatcaccacattattagcgccacttatcggtcgcttgatgcctttattcccgccactggttaccggtgtggttattacttctatcgggcttagcatcattcaggtgggtattgactgggccgccggaggtaaagggaatccgcaatatggtaatcccgtttatttaggtatctcctttgccgtcttaatttttatcttgctcattactcgctatgcgaaaggatttatgtccaacgtcgccgtattactggggattgtatttggctttttacttagctggatgatgaatgaagtcaatttatccgggctacatgatgctagttggtttgcgattgttacgccgatgagctttggtatgccgattttcgatcccgtttccattctgaccatgactgccgtgttaatcatcgtgtttatcgagagtatggggatgttcctggcactgggtgaaatagtcggtcgtaaactctctagccacgatattattcgcgggctgcgtgtcgatggcgtagggacaatgataggcggcacgtttaacagcttcccccacacgagtttttctcaaaacgttggcctggttagcgtgacgcgcgttcatagccgctgggtgtgtatttctagcggaattatattaatcctgtttggcatggtgccaaaaatggcggtgctggtagcctccattccgcaatttgtgctgggcggcgctggtctagtgatgttcggcatggtactggcgacagggattcgaattctgagccgctgtaactacaccaccaaccgttacaacctctatattgtggcgatcagtctcggcgttggcatgactccgacgctctctcacgatttcttttctaagttaccggccgtactgcaaccgctgctacatagcggcattatgctcgcaacccttagcgccgttgtgctgaacgtcttctttaatggctatcagcatcatgctgacctggtgaaggaatccgtctctgataaagatttaaaagtcaggacagtacgtatgtggcttctgatgcgcaagctgaagaaaaatgagcatggagaataatatgaattttttaatgcgcgctatattcagtctgttgttgctttttactctctctattcctgtcatttctgactgtgttgcaatggccattgaaagtcgcttcaaatatatgatgctacttttttaaatggtttttacctgtcggcatccgctcaaaacgggcggttgtcgataaacgctcacttggttaatcatttcactcttcaattatctataatgatgagtgatcagaattacatgtgagaaattatgcaaacggaacacgtcattttattgaatgcacagggagttcccacgggtacgctggaaaagtatgccgcacacacggcagacacccgcttacatctcgcgttctccagttggctgtttaatgccaaaggacaattattagttacccgccgcgcactgagcaaaaaagcatggcctggcgtgtggactaacagcgtttgtgggcacccacaactgggagaaagcaacgaagacgcagtgatccgccgttgccgttatgagcttggcgtggaaattacgcctcctgaatctatctatcctgactttcgctaccgcgccaccgatccgagtggcattgtggaaaatgaagtgtgtccggtatttgccgcacgcaccactagtgcgttacagatcaatgatgatgaagtgatggattatcaatggtgtgatttagcagatgtattacacggtattgatgccacgccgtgggcgttcagtccgtggatggtgatgcaggcgacaaatcgcgaagccagaaaacgattatctgcatttacccagcttaaataaaaaaaccccgacatttgccggggttgtgagcataacgtaatgcttattttaccggacgcatcgccgggaacagaataacgtcgcggatggtatggctgttggtgaacagcattaccatacggtcgataccaattcccagacctgctgtcggcggtaagccatgttccagtgcggtgacgtaatcttcatcgtagaacatcgcttcgtcgtcacctgcgtctttcgcggcaacctgatccaggaagcgttgcgcctgatcttccgcgtcattcagctcgctaaagccgttaccgatttcacgaccaccaatgaagaactcaaagcggtctgtgatttccgggttaacgtcgttacgacgcgccagcggagaaacttctgccggatattcagtaatgaaggtcggctgaatcagatgtgcttctgccacttcttcgaagatctcggtaacgatacggcccagaccccagctcttctcaacgtggatgccgatagattcagcaattgctttcgcagagtcgaagttgtccagatccgccatgtcggtttccgggcgatatttcttgatcgcttcacgcatggtcagtttttcgaacggtttaccgaagtccagcgtcacgtcgccgtaggtcacttccgtcttaccgagaatatcctgtgccagagtacggaacaggctttcggtcagctcgatcagatctttgtaatctgcgtaagccatgtagagttccatcatggtgaactctgggttatgacgtacggaaataccttcgttacggaagttacggttgatttcgaatacacgctcgaagccaccaaccaccagacgcttgaggtacagttccggcgcgatacgcaggtacatgtcgagatccagcgcgttatggtgggtgataaacggacgcgcagcggcaccgccagggatcacctgcatcatcggcgtttcaacttccataaagccgcggttcaccatgaactggcgaataccagagaggatctggctgcgcactttaaaggtgttgcgggattcatcgttggagatgagatcgagataacgctgacgatagcgcgcttcctgatcctgcaagccgtggaatttatccggcagcggacgcagtgctttggtcagcagacgcaactcggtgcagtggatagacagttcgccggttttggttttgaacagcttacctttcgcgccgaggatgtcgccgaggtcccattttttgaactgctcgttataaacgccttccgggagatcgtcacgggcaacgtacagctgaatgcgaccgccaacgtcctgcagggtaacgaaagacgctttacccataatacgacgggtcatcatgcggccagcaacggcgacttcgatgttcagcgcttccagttcttcgttctctttgccgtcgaattctgcgtgcaattggtcagaggtatgatcgcgacggaaatcgttcgggaaggcaatcccctgctcgcgcaggttcgccagcttctcacgacgcgttttcagttcattgttaagatcgactaccgcgtcagcgccctgtgcgtgttgttcagacatgttggttcctcataaccctgctttcaaacttgcttcgataaattgatccaggctgccgtccagcacggcctgcgtgttgcgggtttctaccccggtgcgcagatctttaatgcgggagtcatcaaggacataagaacgaatctggctgccccagccgatgtcggatttgttatcttccatcgcctgtttctcggcatttttcttctgcatctccagttcataaagcttcgctttcatctgcttcatggcctgatctttgttcttgtgctgggaacggtcgttctggcactgggtcacgatcccggtcgggatgtgggtaatacgcaccgcagattcggtacggttaacgtgctgaccgcccgcgccggacgtgcgataaacgtcaatgcgcagatccgccgggttgatttcgatatcaatatcatcatcaacttccggataaacaaacgcggagctgaagctcgtgtggcgacgaccgccggagtcaaacgggcttttacgcaccaggcggtgaacgccggtttctgtacgcagccagccgtaagcgtaatcgccggagattttgatcgtcacggatttaatacccgccacttcaccttcgctctcttcgatgatttcagttttgaaaccacggctttctgcccagcgcagatacatacgctcaagcatgctcgcccagtcctgtgcttccgtaccgccagaccccgcctgaatatcgaggtagcagtcggcgctgtcatattcgccagagaacatacggcggaactcaagctgcgccagtttttcttccagggcgtcgagttcagcaacggcttcgttaaaggtttcttcgtcgtcagcttctacagccagttccagcagaccagaaacatcttccagcccctgtttcatttggtcgagggtgtcgacaacggcttcgagggaggaacgctctttacccagcgcctgtgcgcgttcgggttcgttccagacatccggctgttccagctcggcgtttacttcttccagacgctctttcttggcgtcgtagtcaaagataccccctaagaacgtcggagcgttccgtgaggtcctgaatgcgattatttaccggattaatttcaaacatggtctgatttcttttattgagctagtcaaaatgcggtgataagagcgggattgtacccaatccacgctcttttttatagagaagatgacgttaaattggccagatattgtcgatgataatttgcaggctgcggttgccgcgaaactcgttgatatcgagcttataagccagttgcacttcgcgcacgccgttatccggccagagggcggtatcgacattaaaagcaataccatccagcagtggaccgccgccgaccggttcgaccatcaccttcaaatgacgttcgcccaccagccgctgttgcagcagacggaaatgaccgtcaaacagcggctccgggaacatctgcccccacgggccagcatcgcgcagcagctgcgccacttccatggtcatttcggccgggcttaacggaccgtcacttaccacttcgccttgcaataggctagggtccagccactcagtaaccagttcgccaaaccgttgttgaaagagtttgaatttatcctcttccaggctcaaacccgccgccatcgcatgaccgccaaacttcagcatcatgccagggtagagtgtgtctaatcgctccagcgcatcacgcatatgcagcccctgaatggagcgaccggaacctttcagcgtaccgtcacctgctggcgcaaacgcgataaccggacggtgaaaacgctctttgatgcggctagccagaataccgacaacgccctgatgccattcggggtgatacattgccagcccgccgggtagcgtgtcacggctgcgctccagtttctcgcacagggtcagggcttcaatttgcattccttgttcgatctcttttcgcgtctggtttagcgcatcgagttcatttgccagcacgcgcgcttcgccgatgttgtcgcacaacaacagcgccacaccgacggacatatcgtccagtcgtccggcagcattgagacgtggccccagcgcaaaacctaaatcgctggcggcgagtttttgtgcatcacggtttgccacttcaagcagcgctttaatccccggacggcactttccggctcggatgcgactcatcccctgccaggtcagaatgcgattattagcgtccagcggcacgacgtccgccactgtccccagcgcgaccagatccagcagttctgccaggttaggaattgcgatgttacgctcatcaaaccagccctgatcgcgcaaaaaggtgcgcagcgccagcatcagataaaacgccacacccacgcctgccagacttttgctcgggaaattacagtcgcgcaagttagggttaatgatcgcttccgctgcgggtaatgtgtcgcctggcaaatggtgatcggtaacaataaccgggatgcccaagctgcgagcgtgctcaacccccgcatgggaggaaataccgttatccaccgtgacaattaactgcgcgccacgggcatgggcctgatcgaccacttccgggcttaagccgtaaccgtcttcgaaacggtttggtaccaggtagtcgatattgctgcaaccaaggctgcgcatcgccagcacgcttagagccgtgctggtcgcgccgtcggcgtcgaaatcaccgaccacaataatccgcgttccttcgcgaaaagcgttgtaaaggatctcaacggccttttcgacgccgctcagttgctgccagggcagcatacctttaacactgcgttccagttcttgcgcactgcgtactccccggctggcgtataaacggcgcagcaagggaggcaattcagcgggcaagtctgccgtttcatcgacttcacggcgacgaagttgtatctgttgtttcacgcgaattatttaccgctggtcattttttggtgttcgtcgaggaattctttcatctctttcggcggctggtaacccggaacaagtgtgccattgctcagcacaactgccggagtaccgctaacgccaagctggacgccaagtgcgtaatggtcggcaatatccacgtcgcaactggctggtgcgacgcttttacctgccatcacatcatcaaacgctttgtttttatctttcgcacaccagatagctttcatttctttctctgcatcgctgtccagcccctggcgcgggaaagcaagataacgcacggtgatccccagcgcgttgtagtctgccatttgctcatgcagtttgtggcagtaaccacaggtaatatcagtaaacacggtgatgacgtgtttttcctgcggcgctttataaacgatcatctctttttcaagcgcattcaactgctttaacagcatcttattggtgacattgaccggagccgtgccactaacgtcatacattggcccctgaatgatatgtttaccatcatcggtgatgtacaacacgccgctgttagtcagaactgtcttcatgccagctacaggcgcgggctgaatatcgctgcttttgatgcccattttggctaacgtttgttgaattgccgcgtcatcagcctgagcaaagccactaaacgccgctaacaaagtaaacaacataaaacctttcttcataaatcttcccgttcttttcagacatcacgcccgcgggtgatgctgttgatgaagttgccgcagacgctcggtagcgacatgcgtataaatttgcgtggtggagagatcgctgtggcccagtagcatctgcaccacgcgtaaatccgcaccatgatttaataaatgagtggcaaaagcgtgacgcaacacatgcggactcagcttttcgctgtcgatacccgccagcacagcataatgtttaatacggtgccagaaggtctgtcgcgtcatctgctgcgcacgctggctgggaaacaacacgtcaatactcacaccattcagcagccacggacgcccatgttccagataggtttccagccagtaaaccgcctcttcacctaacggcaccagacgctctttgttgcctttaccaatgacccgtaccacgccctgacgcaggctgatatcactcattgtcagtccgaccagttcagagacacgcagcccggtagcatacaacacttcaagcatggctttatcgcgtagctccagtggctgatcgattaatggtgcctgtaataaacgttcgacctgcgcttcgcttaaatcttttggcaaacgctggggcaatttcggactagcgagatgcgcactgggatcgtcttcacgaaacttttcgcgataaagatactggaacaatcggcgcactgcactcagcaaacgcgcactgctggtggctttatacccgccctccagccgttctgccagtaatgcctgcaaatcgtcactttgcgccgtcgccagcgtcaacccgcggtgatgcaaccactccaccatcatactcagatcgcgacggtaagcgttcaacgtattttcagccagatttttttccagccacagagcatcaagaaactgctcgatgcgtgccagatcctgtttcacttgcgccccttatggtcactcatttgatccattatgccttattgtgccgtgactaaagcgattctgatacactagccgcaaaagccacagcagaatcgagaagcttacgttatgaatatgggtcttttttacggttccagcacctgttacaccgaaatggcggcagaaaaaatccgcgatattatcggcccagaactggtgaccttacataacctcaaggacgactccccgaaattaatggagcagtacgatgtgctcattctgggtatcccgacctgggattttggtgaaatccaggaagactgggaagccgtctgggatcagctcgacgacctgaaccttgaaggtaaaattgttgcgctgtatgggcttggcgatcaactgggatacggcgagtggttcctcgatgcgctcggtatgctgcatgacaaactcagcaccaaaggcgtgaagttcgtcggctactggccaacggaaggatatgaatttaccagcccgaaaccggtgattgctgacgggcaactgttcgtgggtctggcgctggatgaaactaaccagtatgaccttagcgacgagcgtattcagagctggtgcgagcaaatcctcaacgaaatggcagagcattacgcctgatctcactgacggcttagcgcatatgctttgccgtcatctttatctttgcgtctcttgttgcaacaaaatccgccgtaaatcccgccattcagcttcgtccatgctgtcggctgccagccataaatgttgccgtttaccgccatcagaacgtaaacgcagcatcatgccgctcttaatcatccacggtgctttgacgatgctccactcctgcccttgccaacgcaaacgcccgtccatcaacaagcgaatttccccctggcgagcattaatacgccgctggctgcgaacgcaatcaaacaccaccaggctaagtaacaccatccataacggggtgtaactgagtggccagggcatgagtaaaataacagcggcaaccagcccatgaatcagcaaggaaagccactgtgcgcgccaggagacgcgcaaatcagattgccacaggaccacgttcccggttccgtgtctggatgagtcggaccatcatttccagttctgcatcggccggtttaccgtgattcatcagccagttaaacaggtccggatcgtcacattccagcagacgaataaagatgcgtttttcgtcatcgcttaagctgtcgtactcatgttcgaaaaacggcatgatactaatatcgagttcgcgcataccacggcggcatgcccaatgaatgcgggctttgttgttaatgtccatcttcttcctgtctcacgaaaatccagtacccggctattgtaacgtgtttttcgccttcttttacgggaatatcagtaaacaccatcgcgatcgcgaaattaattcacaacaattcaatggcttcatttttttggaagtcgcctcgcagaaggcacagatcgcgtagtgaaagcacttgcattgcctcatagctcttttaccattagtcattaatacgccgttaagcaactcaggactctattatggcttttacaccttttcctccccgtcagcctacggcttctgcccgtttaccgctgacgctgatgacgcttgatgactgggcgcttgccaccattactggcgcggacagcgaaaaatatatgcagggtcaggtgacagcagatgtcagccagatggcagaagatcagcacctgctcgccgcccattgcgacgccaaaggtaaaatgtggagcaatttacgtctgttccgcgacggcgatggctttgcatggattgaacggcgcagcgtgcgtgaaccgcagctgactgaactgaaaaaatatgcggtattctctaaagtgaccatcgcgccagacgacgagcgtgtgctgcttggtgttgccggttttcaggcgcgcgccgcgctggcaaatctctttagcgaactgcctagcaaagaaaaacaggtagtcaaagaaggcgcgaccactttgctatggtttgaacacccggcagaacgtttcctgatcgtaaccgatgaagctactgctaatatgctgaccgataaactgcgcggtgaagcggaactgaacaatagccaacagtggctggcattaaacattgaagcgggtttcccggtgattgatgccgccaacagcgggcagtttatcccacaggcgaccaatctccaggcgctgggcggtatcagctttaagaaaggctgttataccggacaagagatggtggcgcgagcaaaattccgtggtgccaataaacgtgcgctctggttgctggcaggtagcgccagccgactgccggaagctggtgaagacttagagctgaaaatgggcgagaactggcgtcgtaccggtacggtactggctgcggtaaaactggaagatggtcaggtcgtggtacaggtcgtcatgaataacgatatggaaccggatagcatcttccgcgtacgcgacgatgcgaatacattgcatatcgagccgctgccgtatagcctcgaagagtaaatctctttatcgcatcaggcatttatcgcctgatgcgacgctggcgcgtcttatcatgtctgggatttgatgcctttatcacaacagggacgaggcccgtagatcggataaggcgttcacgccgaatccggcagttgtgctccgatgcctgatgcgacgctggcgcgtcttatcaggcctacaaaggcatacccattacgcctgcccaatatacaaatagatcgccagaaagtggcacacactaccgccgagcacgaagccgtgccagatggcatggttgtatggaatgcgtttgcagacgtagaaaatcaccccgaggctataaaccacgccgcctaccgccagtaaggtaacgctgcccgccgcgagcttaactgccatttcataaattaccaccaggctcagccagcccatcgccagataggtcaccagagataaaattttgaatcggtgcgcgatggtcagtttaaacagaatacccagcaatgccaggctccagataacaatcatcaacccgcgcgctaacggagaatccagccccaccagcaaaaacggcgtgtaggttccggcaatcaacaggtaaatagcgcaatggtcaaatttcttcagccacatttttgcccgttgatgaggaatggcgtgatagagcgtgctagcgaggaacagcaggatcatactgccgccatagaggctgtagctggttatcgctgtggcgctggcattaagatccaccgcctgaaccagtagcaacaccagcccaacgataccaaacaccaacccaatgccgtgactgacgctgttggctatttcctctgccagactatatccctgcttaatgaggggcttctgaaccataacttactccggagaaacgtacacgcacatgtatacctctccagcgtaactgagaatagttccagtgaacacctgttagctaaaataaattctgatttgagactaatctcctaaaaatcatgaaattaaatgcgaaatttcaactaacaggcgtgagttcaatttaaagacatttaaattcaatcacataaaattgtgtctgaccgggatagatgtcagcaatgacttttttcagttcagtcagggtcatattttcctgctctgcatgtttttcagtcagcgtatccagcgttacggtactggttgcggtgacttcaatcgtgcaaaaataaccgtcatcttcaaaacgtccgacacgaagcacatcacccgttttgaagtggctttcagactcgtcgcggatggtgatggttttacgcccagccagaatgtcatcctggaaacgttgaaaaaaagtgatgtcgtttggctgcatggtactatttcctgtaagaattgactcatctggagcctatgatagtgaaaaaactcaccttaccgaaagatttcttatggggcggcgcagttgccgctcatcaggtcgaaggcggctggaacaaaggcggaaaagggccgagcatttgtgacgttctgaccggtggcgcacacggcgtgccgcgcgaaatcaccaaagaagtcttgccaggaaaatactatccaaaccatgaagccgttgatttttatggtcactataaggaagacatcaagctatttgccgaaatgggcttcaaatgttttcgtacatccattgcctggacgcgcatttttccaaaaggcgatgaagctcagccaaacgaagaagggctgaagttctacgatgatatgttcgatgaactgctgaaatacaacatcgaaccggtgatcaccctctcccactttgaaatgccgctgcatctggtgcagcaatacggtagctggaccaaccgtaaagtggttgatttctttgtacgtttcgcggaagtggtatttgaacgctataagcacaaagtcaaatactggatgaccttcaacgaaattaacaaccagcgtaactggcgtgcaccgctgttcggttactgctgctccggcgtggtgtataccgagcatgaaaacccggaagagacgatgtatcaggtgctgcatcaccagtttgtcgccagcgccctggcggtgaaagctgcgcgtcgcattaacccggagatgaaagtcggctgtatgctggcgatggtgccgctctatccttactcctgtaacccggacgatgtgatgttcgctcaggagagcatgcgcgaacgctacgtctttaccgatgtgcagctacgcggctattacccgtcctatgtgttgaacgagtgggagcgtcgcggatttaacatcaaaatggaagacggcgatctggatgtgctgcgtgaaggcacctgcgattatcttggtttcagctattacatgaccaatgcagtgaaggccgaaggcggcaccggcgatgcgatctctggttttgaaggcagcgtaccaaacccgtatgttaaagcatctgactggggctggcagattgatccagtaggtctgcgctatgcactttgcgaactgtatgagcgttatcagaggccgctgtttattgtcgaaaacggttttggcgcttacgacaaagtggaagaagatggcagcatcaacgacgactaccgcattgactacctgcgcgcccatatcgaagagatgaaaaaagcggtgacttacgatggcgtggatctgatgggctacacaccgtggggctgcatcgactgcgtgagcttcaccaccgggcagtacagcaaacgctacggctttatctatgtgaataaacatgacgacggtactggcgatatgagccgtagtcgtaagaagagctttaactggtacaaagaggtgattgccagcaacggcgagaagctttaagtcgatgaagtaccggatgcaatacttgttgcatccggtcagacaacttccctgttttatttcccgcccgccaaatcgataaaacttcccgtgacgtaagaggctttatcacttagtagccagacaatggcctgcgcgacctcttctgcctgtccaccacgctgcatggggatgttgctcttaacgcgatcgacgcgtccaggctcgccgccgctggcgtgcatttcggtataaataaaccctggccgcacgcagttaacgcggatcccctgcgcggcgacttccaggcttagtccggtggttaacgtatcaatcgcccctttgcttgccgcgtaatcaacatattcccctgggctacccaaccgactggccacgctagagacattgacgatagcgccgccactgccaccatttttaagcgccatgcgttttaccgcctcgcggcagcagagaaaatatcccgtcacgttggtggaaagtactcggttgattcgctctgcggtaaggttttcaacggtgcactgggtaaacaagatcccggcgttattgaccagcgctgctagcggttcatcgtgctgatcgattgctgtaaacatcgcaacgacctggttttcgtcgctgatatccgcctggagcacgaatgctttgccaccggcttgcgttattaagttcatcacttcctgcgccgcgtggaggttttgctgataattaaccgccaccgtatacccttcttgcgccaacagtaatgcagttgcccgcccgatgccgcgactgccaccagtcacaagtgctatagccatttgtttttccgagaaaaattaattcgttgacgtatctttgagattgctaacaaactggctcaatcttcaatgttggcacgcttttccccctcgccctttcagggagagggccggggtgagggtaaatattcgcgccagtgccggcctgttcccctcaccctaaccctctccccaaaggggcgaggggactgtctgagcacttttgtactttgtcatctgactaaaaaggcgccgaagcgcctttagaaaatagtcgaatcagtgaattactggtattcgctaatcggtacgcaggagcagaacaggttacggtcgccgtaaacatcatccagacgtttcactgtcggccagtatttgtctgccacacctgccgggaataccgcaacttcacggctgtacggatgcgcccactcggcgaccagttcgctctgaatgtgcggcgcgttcaccagcgggttatcttccagcggccagacaccggctttcacctggtcaatttctgcgcggatagccagcatcgcgtcgataaagcgatccagttccactttgctttcagattcagtcggttcaaccatcagcgtacccgccaccgggaagctcatcgtcggcgcgtggaaaccgtagtcgatcaggcgcttggcaatatccagctcgctgatgccggtttcttctttcagcgggcgaatatcgagaatacattcgtgcgccacgcgaccgtcgcgaccggtatacagcaccgggaaggcatcctgcaggcggctggcaatatagttggcgttgaggattgccacctggcttgcttttttcagcccttctgcgcccatcatgcggatgtacatccagctgattggcaggatagaggcgctaccgaacggtgccgcagaaaccgcgccctgacgggttaacatgccttcgatttgcaccacgctatgacccggtacaaacggtgccaaatgcgctttcacgccgatcggtcccatacccggaccaccaccgccgtgcggaatgcagaaagttttatgtaggttaaggtgactaacgtccgcaccaataaagcccgggctggtgatgccaacctgggcgttcatgttcgcgccatcaaggtaaacctgaccgccgaactgatgcacgacttcacacacttcacggatcgtttcttcatacacgccgtgggtagaaggataagtcaccatgatacaggagaggttatcgcccgcctgttccgctttcgcgcgcagatcagtcagatcgatgttgccgtttttatcacacgccacaaccaccacctgcattcctgccatatgtgcagaagcggggttagttccgtgcgcagaagccgggatcaggcagatatcgcgatgcccttcgttgcggctttcatgataatgacgaatcgccagcaggcccgcgtattcgccctgtgcgccagagttcggctgcatacaaacggcgtcgtaaccggtcagtttcaccagccagtcagccagctgcgcaatcatctgctgataaccttcggcctgctccggcgggcagaacgggtgcagttcggcaaattccggccaggtgattgggatcatctcggcggcggcgttcagtttcatggtgcaggaacccagcgggatcatcgcctgattcagcgccagatctttacgctccaggctgtgcatatagcgcatcatttcggtttcgctgtggtagcgattaaacaccggatgggtgaggatttcgtcgtcgcgcagcatcgcaggctggatagagcggctgtcgtgagccacgtctttgtccagcgtgtcgatgtccaggccgtggttatcgcccagcagcacgttgaaaagctgcattacgttttcacgcgtggttgtttcatcaagggtgatcccaaccgcgttcagaatatcgctacgcaggttgatttcagccgcttcggcacgcgtcagtacgcccgctttgtcggccacttccacacacaaggtgtcgaaatagtgcgcatggcgcagtttcagacctttttgttgcaggcccgccgccaggatatcggtcagacggtgaatgcggttagcgatacgtttcaggccaaccgggccgtgataaacggcatacaggctggcgatgtttgccagcagtacctgggaagtacaaatgttggagttcgctttctcacggcggatatgttgctcgcgagtctgcatcgccatgcgcagcgcggtattgccagctgcatctttgcttacaccgataatacggcccggcatactgcgtttgtattcatctttcgccgcaaagaatgccgcgtgtgggccaccgtagcccatcggcacgccgaagcgttgcgcgctaccaaaaacaatatccgcgccctgtttacccggcgcagttaacagcaccagcgccataatatcggcggcaacgctgaccacaattttgcgacttttcagttcgctaataagcgcagtgtagtcgtgaatttcaccggtagtgcctacctgctgtaacagcacgccgaagacgtcctgatggtcgagcactttttgcgcgtcatcgacaatcacttcaaaaccaaaggtttcggcacgagtacggaccacatccagcgtttgcggatgcacatcggaagccacgaagaagcggttggcatttttcagtttgctgacgcgtttcgccatcgccattgcttcggcggcagcggtggcctcgtccagaagagaagcagaggccatatccagtccagtcaaatccagcgttacctgctggaagttgagcagtgcttcaaggcggccctgggagacttcaggttgatacggagtgtacgcggtataccagcccggattttccagcatgttacgcaggataaccggcggtagctgcacggcggtgtaacccatgccgatgtaagacgtgaagcgtttattgcgactggcaatagccttgagttctgccagtgcggcgtattcggtcgccggtgcgccaacctgcggtggtgtcgcaagttgaatatctttcggcacaatctggccggtcagcgcgtttaagctttgtgcaccaacggcattcagcatttcttgctgttgcgcggcgtccggtccgatatggcgttcaataaaagcgccgctgttttcaagctggcttaacgtctgtgtcatgagcgatggttcctgaaacgtgcagtgaattgtgaacctctctccttacgaagagagtgagggtgaggcataaattttcctcaccctgatcctctcccgcagaagaggaataaagccgttactcgtcttctaacaatgcttcgtatgcggtcgcatccagcagactttccagttcgctttcatcgctggctttgattttaaagatccagccgcctgcatacggttcgctgttcaccagttccggggaatcgctcagtgcgtcgtttaccgccacgatttcaccgcttactggcgcataaatgtcactcgccgcttttacgctttcggcaaccgcgcagtcatcgcccgcgctaaccgttgcgcccacttccggcaggtcaacaaacaccatatcgcctaacagctcctgagcatgttcggtaataccaacggtgtaagtgccgtcggcttctttacgcagccattcgtgttctttgctgtatttcagttctgctggtacgttgctcatcaatcaatctccaaaaaagtaaatcacgcgacggctttgccgttacgcacaaaaacaggttttgtcactttaaccggcatttcacggttgcgaatttgcacaatcgccgtttcgccaataccttccggcacgcgcgccagcgcaatgctgtaacccagcgtcggggagaaagtaccgctggtgataatgccttcatgctggttgccctgcgcatcggtaaagcgtaccggcagttcattacgcagcacgcctttttcggtcatcaccagaccaaccagtttttctgtaccatgctcacgctgcacttccagggcttcacgaccgataaagtcacgatctgccggttcccaggcgatggtccagcccatgttggcggctaaaggagagatggtttcgtccatctcctgaccataaagattcatgcccgcttccagacgcagcgtgtcacgcgcgcccaagccacatggcttaacacccgcttccaccagcgcacgccagaaatcggccgctttttcattgggcagcgcaatttcatagcccgcttcaccggtataaccagtggtggcaataaacagatcgcccgcctgcacgccaaagaacggtttcatcccttccaccgcctgacgctgggcgtcattaaacagtgtggcagcttttgcctgcgcattcggcccttgcacggcaatcatggaaaggtcatcacgaacggtaatttcgatgccgaaaggttcagcgtgttgggtaatccaggagaggtctttttcgcgggtggcggagttaacaacgaggcggaagaaatcttcagtaaagtagtagacgatgaggtcatctatcacaccgccagaggcattcaacatcccgctgtaaagggctttgccgcttttggtgagcttcgccacatcgttcgccagcagataacgcagaaactcccgggtgcggctgccgcgaagatcgacgatggtcatatgactcacatcaaacattccggcatcggtacgtaccgcatgatgttcgtcgatttggctaccgtaatgcagcggcatcatccagccgtggaaatccaccatgcgagcgccgcaaagcgtgtgttgttcgtacaaaggagtctgttgtgccatcttgtcctcattgaataagcggggctgacaactttttcatggtgaaattatcaccacgaaacccagcatcggagccactcccggtccccaacgcaatcgttctcttttgcctgaacttaccaccgaaacagactgttaaccataaggtaaaattgatcatcacattagcttatggttaaaaaatgcaaaaatcgcgacagaataaaaaaccaaaaaatacaccagtttctatacaaagatgatgtgatgagaaagtcaatttgaataagacaatattaagagctaaaaaaatgtcaaaaaacactaaatcaaaaaataatggcattagaaaatataatgcgaaaacggaggtgaaattagtttatttcaaatgaggaaaatctcccggcgaaaaaaccgggagatgaaagtgtgatgggtatcaaataaacaacagaggagaaatttttaacgcagccattcaggcaaatcgtttaatcccattgcctggcggataagttgcggcttaacgccaggaagcgtgtcggccagtttcaaaccaatatcacgcagcagttttttcgccggattggtaccggaaaacagatcgcggaatccctgcataccagccagcatcaacgccgcactgtgcttgcggctacgctcatagcgacgcagataaatgtactgcccgatgtctttcccctgacgatgcaaccgtttcagttcggcaatcagctctgcagcatccataaagccgagatttaccccctgccccgccagcgggtgaatggtatgtgcggcgtcgcccaccagcgccagacggtggctggcaaactggcgcgcataacgccccgtcagtgggaacacctgacgcgcgctctcaaccttgcataagcccaggcgattatcaaaagcgatatttaacgcgcgattaaattcgtcttcacttgcctgctgcatccgctgcgcttcctctgggctcagactccagacaatgctgcaaagatgcggatcgctaagcggtaaaaaggccagaatgccttcgccatggaaaacctgccgcgccaccgcatcatgcggttcttccgtgcgaatggtcgctaccagcgcgtgatgctgataatcccagaaagtcagcggaatatcggctttgttgcgcaaccaggaattagcgccgtccgcgccaatcaccagacgcgccgttaacatgctgccatctttcagcgtcaggaaggtttcattttctccccaggcgacctgctgtaattctgcgggggctaacagagtgatatcactgctctgatgcgctttgttccacagcgcgtagtgaatcacactattttcaacgatatgcccaagatggctatagcccatgctttgatcgtcaaagctaatgtgaccaaagctgtctttgtcccacacttccataccgtgataacagctggccctacgagagagaatgtcctgccagacgccaagacgggtgagtaatttttcgctggcggcattgatagcgctaacgcgcagttgtggtggtgcattcgccgccagaggttcctgtacgcgctgctccagtacggcaacgcgtaagccgctcccctgtaagccacaggcaaccgccagccccaccatgccgccgccaacaatggctacatcaacactttgcattgtttattccttaaaaccgccttcaacgcgccacccaaccgagggtgcgctgcgccagcacatcgcgtgccggggtgaataattccatcgtcatcagcccgatgttgcgcccgacaaccagcggtgcccaacggttggcaaaaagatgtacaaggctgtccgtgacgccaatggttgcttcgcgatcgctctgtcgacgctgctgataacggcacaatacgccgtaatcccccatgtcttctccgcgctcctgcgcctgagtcagggtttccgcaagactcatcacatctcgcataccgaggttaaacccttgcccggcaatcgggtgcagagtttgcgccgcattgcccaccagcacggtacgatgggtaatagatctggcggcgtgggttaacgccagcggataagcactgcgtttaccagcgtgggtaattttcccaagtcgccagccaaaggcgctctggagttcacggcaaaacttctcgtcactccagctcaacacctcttcgcgccgttccagtggatgacaccagaccaggctacagcgtccgtcagacatcggcaacatcgccagcgggccatgttgcgtaaagcgttcaaaagcgcgcccttcatgcgcaacggaagtagcaacgttggcaatcacggccagttgttcgtaaggctcctgctgccagtcaacgccgcacgcggtggctaacgcactatgggtgccatcagctgctaccagcacgcggcccgtcagcgtctcgccactctccagcgtcacttcaacgtgactctgagtacgggcaacgttagccacgcgatcagggcaatgcagcgttacgccaggtgctttacgcagcaatgcaaacagccgttgcccgacattgtgcaattcgacaacctgtcccagcgccgccagttggtaatcttctgcggcgagggtgacaaatccagcgtgaccacgatcgctgacatgcacggtggtgatggcagttgcgcaatccgccagagattgccagacgccgatgcgcgccagttgctgacaggtacccgccgccagcgctatcgctcgtccatcaaagcccggatgagcatgactctctggcgcagtcgcttcaatcaaatgtaccggcagcgccccgtgacttaaccgggaaatagccagcgccagcgtcgcgcccgccatgccgccaccgacgatgattacgctcattgctttctcgcagcaaccatcaacgcttcgatttcttccggctttttcaccacgctggcggtgaggttttcgttaccggtttcggtaatcacaatgtcgtcttcaatacgaatgccgataccgcgatattgttctggcacttctgcatccggcgcaatatacagccctggctctacggtcagtaccatgcccggttccagaatgcggctgcgatcctgaccataaacacccacgtcatggacatccagtcctaaccagtggctaaggccatgcataaagaaaggacgatgggcgttctgagcgatcagttcatcaacatcacctttcaggatgccgagttttaccaggccgctaaccatgatgcgcaccacttcaccagtgacttccagaatggaagttcccggacgatacaggcgcaggctggtttcgagagactccagcacaatgtcgtagatttcacgctgggcctgggtgaatttgccgttgaccgggaaggtgcgggtaatatcgccagcgtaacctttgtattcacaacccgcgtcaatcaacaccaggtcgccgtcgcgcatttcacactcgttttcggtgtagtgcagaatgcagccgttttcaccgctgccgacaatggtgttataggacggatagcgcgcaccgtggcggttaaattcgtggtgaatttcgccttccagatggtactcgaacattcccggacggcatttttccatcgcccgtgtatgtgccatggcggtgatttctcccgcgcggcggagtacggcaatctcttctgggcttttgaacaggcgcatttcatgaacaacaggacgccagtcgatcatcgttgccggtgcggtgagattttgccggctacctttacgcagtttttccagcgcactgttcacgattacatcagcatatgcatattcgccctgggcatggtaaaccacatccaggccgttaagtagttgataaagttgctgattgatttcgctgaatgccagtgcgcggtcaacgcccagtttctctggcgcggcatcctggcctaagcgacggccaaaccagatctccgccgtcaggtcgcgaacgcggttaaacagaacgctgtggttatgagtgtcatcgcttttaatcagcaccagcaccgcttccggttcgttaaagccggtgaagtaccagaagtcactgttctgacgataggggtattcgctgtcggcgctacgtgttacttctggtgcagcaaaaatcagcgcggcgctgccgggttgcatttgctccaccagggcctgacggcgacgctgaaactcttgccgggatatctcactcataacactctccttacgttttttgtttttagtgtagagtcggtttttgtacttctggcgcggtcggttgcggatgagtaaaggtgtcgtggcataacagcgcggcaacacgaacgtattcgatgatctcttcaaggctcatttcaagctcttcctgatcttcgtcttcgtcgtaacccagttgcgcaatgttacgcagatcgtcgatagcttcaccggtttcgccggtcactttatccagcttcggttgcgtaacgccaagaccaagcaggaagtgattgacccaacctgccaatgcatcagcccgatcgaaaacgctgacatcatcgccatcaggcagataaagctgaaaaaggaagccgtcatcctgcagggcatcgctggtggcagagtgcattttacgcagtgcctgtgccagctcatgaccgaaagccatgccttcgttcgtcaggtcgtgaagtagcggtagccaactgctgtcatcgttaccgccacatatcatcccgctgattaaaccatgcatctcagctggggtcagacccgtcccttgttggttcagatactggttcatttcgttgtaaccaggcatttcgttctgtatagacataagcattcgtcgtcaaagggaggaatattcatgatatgctaccactttgggccctggtggaccagaaaagggcttgtctcttctcatcagggtagctatagtgtcgccccttcgcagaccatgggtctaaagacgaaggcagcgcagtcaatcagcaggaaggtggcatgtctgcacaacccgtcgatatccaaatttttggccgtagtctgcgtgtgaactgcccgcctgaccaaagggatgcgttgaatcaggcagcggacgatctgaaccaacggttgcaagatctgaaagaacgcactagagtcacaaatactgaacagttggtcttcattgccgcattgaatatcagctatgagttagcgcaagaaaaagcaaagactcgtgactacgcggcaagtatggaacagcgtattcggatgctgcagcagaccatagaacaagcgttacttgaacaaggtcgcatcaccgaaaaaactaaccaaaactttgaatgacacttttcggtttactgtggtagagtaaccgtgaagacaaaatttctctgagatgttcgcaagcgggccagtcccctgagccgatatttcataccacaagaatgtggcgctccgcggttggtgagcatgctcggtccgtccgagaagccttaaaactgcgacgacacattcaccttgaaccaagggttcaagggttacagcctgcggcggcatctcggagattcccttcttatctggcaccagccatgacgcaactaccagaactcccactgacattatcccgacaagaaatccgcaaaatgattcggcaacgtcgtcgtgcgttaacgccggaacaacagcaggaaatgggtcaacaagccgctacccggatgatgacttatcccccggtggtgatggcacatacggtcgctgtattcctctcttttgatggcgaactcgacacccagccactcatagaacaactctggcgcgccggtaagcgcgtatatcttccagttttgcatccctttagtgccggtaatttgctgttcctgaattaccatccgcaaagcgaactggtgatgaacaggttgaagatccatgagccaaaattggatgtgcgtgacgtgctacccctttcccgattagacgtgctgatcacaccgctggtcgcctttgatgagtacggtcagcgcctgggaatgggcggtggtttttatgatcggaccttacaaaactggcagcactataaaacgcaaccggtgggttatgcgcatgattgtcagttggtggaaaaactccccgttgaagagtgggatatccctcttcctgcggtggttacaccgagcaaagtctgggagtggtaagggcgatacacccgcatcgccctgattgacatcgttgattctttgacctaatttagtgagtaagggtaagggaggattgctcctcccctgagactgactgttaataagcgctgaaacttatgagtaacagtacaatcagtatgatgacaagtcgcatcataacccttctccttcaagccctcgcttcggtgagggctttaccgttacagccccatgctgccctgccatcgtaaatccccattaaataaacacaacgcattgatctgactttgatttattttctggagcagactcgcaaagtagaatgcgcaacgcggcaacggtgtggagaagggataaaaaaacgggcaagtcagtgacctgcccgttgattttcagagaaggggaattagtacagcagacgggcgcgaatggtacccggaatagctttcattgcctgcagcgctttttcggcaacgtcttcgtcggcttcaatatcaataaccacataacccatctgggcggaagtttgcagatattgcgcggcgatgttgacgccctgctcggcgaagattttgttcagcgcagttagcacgcccggacggttttcgtggatgtgcatcagacgacgcccaccgtgcagtggcaggctgacttccgggaagttcaccgcagagagcgtactgccattgtcagaatacttgatcaatttacccgcaacttccaggccgatattctcctgcgcttcctgagtgctaccgccaatgtgtggcgtcagaaggacgttgtcgaattcacacagcggagaggtaaatggatcgctattggtcgccggttccgtcgggaatacgtcgattgccgcccccgccagatgtttgctcgccagcgcatcacacagcgccggaatatccaccacagtaccgcggctagcattaatcagcaggctgccgggcttcattagactaatttctttcgcgcccatcatatttttggtggacggattctctggtacatgcagactcaccacatcgctcatattcagcaggtcagaaagatgctgtacctgagtggcgttgcccagcggcagtttattttcaatatcataaaagtaaacatacattcccaggctttcagccagaatgcccaattgcgtaccaatatgaccgtagccgatgatacccagctttttgccgcgcgcttcaaaagaacccgccgccagtttgttccacacgccacggtgcgctttagcattggcttccggcacgccgcgcaatagcagcagcagttcgccaatcaccagctccgcaacagagcgcgtattactgaacggtgcgttaaataccgggatcccgcgctttgccgccgcatccagatcaacctggtttgttccgatacagaaacagccaatagcgaccagtttttctgcggcgttgatcacgtcttcagtcagatgggtacgggatcgcaggccgatgaagtgggcatcgcggatggattcttttaattgttcatcatccagcgcgcctttgtgaaattcgatgttggtgtaaccagctgcacgaaggctttccagcgccttttggtgcacgccttctaccagcagaaacttaatcttgtctttctccaggcttacctttgccatttacccaatcctgtcttttgaaatgttgtgtgcggatttgcatccgcctttcaacatatcaaaaaataatattgcggcaatatgaacgtttgcgtcgcgatgttgaggaaatatcacgcaaaggtaattcttggatgaatatgctggtttagaggatttatttagagcaatcgacaattgcctggtaaaagcgtgacacatgtcaccaaatttaatgaagagaatttttttaacgggggaggttcccccgtcagatcatttcacaatggttttgacaccgtcaggtgtgccaatcagcgcaacgtccgcgccacggttagcaaacaagccaacagtcaccacgccaggaatcgcatttatggcgttttccatcgctatcgggtcaaggatttccatgccgtggacgtcgaggatcacgttgccattatcggtcaccacgccctgacggtattccggacgaccgcccagtttcaccagctgacgcgccactgcactacgtgccatcgggataacttctactggcagcgggaatttacccagaatatcaacctgcttggaagcgtctgcaatacagataaatttttctgcaacgctagcaatgattttttcacgggtcagcgccgcgccgccgcctttgatcatttgcatgtggccgttgatttcatctgcgccatcaacgtagatgccaaggctgtcgacttcgttgagatcaaaaacgtgaatgccgaggcttttcagtttttcagtggaagcatcactactggaaacggccccttcaatctggcctttcattgtaccgagcgcgtcaataaagtgtgcggcggtggaacctgtacctacaccaacaatggtgccgggctgaacatactgaagtgccgcccatcctactgcttttttcaattcatcctgcgtcatgatcgtttcgcctgtggtatgaaatttcacacgcattatatacaaaaaaagcgattcagaccccgttggcaagccgcgtggttaactcatccataaaatatcgcgcaatggcaggcatcccctttcgccccgcaaataaagcatacaacggtctgggtatgccgctccacggtgcaaacaggcgcaccagttcaccgttcgcaagcccctgtttacaggcaaattgaggcaataacgccacgccattcaacacaaccagggcgcgaactcgctgagcgaaatgcattagcgcaaatccctgatcttttaagctgcgcttttaaccacggatacaaatgttacccgccgacggcttcggtatatgcaacctgacacaaaattgtgtcatagtgcaggaaaaagcatttaccaggagcagacaacagcaatgaaacgcccggactacagaacattacaggcactggatgcggtgatacgtgaacgaggatttgagcgcgcggcacaaaagctgtgcattacacaaagtgccgtcagtcagcgcattaagcaactggaaaatatgttcgggcagccgctgttggtgcgtaccgtaccgccgcgcccgacggaacaagggcaaaaactgctggcactgctgcgccaggtggagttgctggaagaagagtggctgggcgatgaacaaaccggtagcactccgctgctgcttagtctggcggtcaacgccgacagtctggcgacgtggttgcttcctgcactggctcctgtgttggctgatagccctatccgcctcaacttgcaggtagaagatgaaacccgcactcaggaacgtctgcgccgcggcgaagtggtcggcgcggtgagtattcaacatcaggcgctgccgagttgtcttgtcgataaacttggtgcgctcgactatctgttcgtcagcagtaaaccctttgccgaaaaatatttccctaacggcgtaacgcgtagcgcattactgaaagcgccagtggtcgcgtttgaccatcttgacgatatgcaccaggcctttttgcagcaaaacttcgatctgcctccaggcagcgtgccctgccatatcgttaattctagtgaagcgttcgtacaacttgctcgccagggcaccacctgctgtatgatcccgcacctgcaaatcgagaaagagctggccagcggtgaactgattgacttaacgcctgggctatttcaacgacggatgctctactggcaccgctttgctcctgaaagccgcatgatgcgtaaagtcactgatgcgttactcgattatggtcacaaagtccttcgtcaggattaatccatcaaataatgcctgatagcacatatcaggcgttgtcctcacttctttttgtattccttgaatcacatcacaaaatagacaaatctcaggcggcaaaaaacgacgtctgaatgcattttttttgctggcgacaaacccacgtaaaaagctcaccgtaggcgcaaataccctcattttgattgcgttttacggagcaaataatgtctaacgtgcaggagtggcaacagcttgccaacaaggaattgagccgtcgggagaaaactgtcgacagcctggttcatcaaaccgcggaagggatcgccatcaagccgctgtataccgaagccgatctcgataatctggaggtgacaggtacccttcctggtttgccgccctacgttcgtggcccgcgtgccactatgtataccgcccaaccgtggaccatccgtcagtatgctggttttagtacagcaaaagagtccaacgctttttatcgccgtaacctggccgccgggcaaaaaggtctttccgttgcgtttgaccttgccacccaccgtggctacgactccgataacccgcgcgtggcgggcgacgtcggcaaagcgggcgtcgctatcgacaccgtggaagatatgaaagtcctgttcgaccagatcccgctggataaaatgagcgttagcatgaccatgaatggcgcagtgctaccagtactggcgttttatatcgtcgccgcagaagagcaaggtgttacacctgataaactgaccggcaccattcaaaacgatattctcaaagagtacctctgccgcaacacctatatttacccaccaaaaccgagtatgcgcattatcgccgacatcatcgcctggtgttccggcaacatgccgcgatttaataccatcagtatcagcggttaccacatgggtgaagcgggtgccaactgcgtgcagcaggtagcatttacgctcgctgatgggattgagtacatcaaagcagcaatctctgccggactgaaaattgatgacttcgctcctcgcctgagcttcttcttcggcatcggcatggatctgtttatgaacgtcgccatgttgcgtgcggcacgttatttatggagcgaagcggtcagtggatttggcgcacaggacccgaaaagtctggcgctgcgtacccactgccagaccagtggctggagcctgactgaacaggatccgtataacaacgttatccgcaccaccattgaagcgctggctgcgacgctgggcggtactcagagtctgcataccaacgcctttgacgaagcgcttggtttgcctaccgatttcagtgcacgcattgcccgcaacacccagatcatcatccaggaagaaagtgaactctgccgcaccgtcgatccactggccggatcctattacattgagagcctgaccgatcaaatcgtcaaacaagccagagctattatccaacagatcgacgaagccggtggcatggcgaaagcgatcgaagcaggtctgccaaaacgaatgatcgaagaggccagtgcgcgcgaacagagcctgatcgaccagggcaagcgtgtcatcgttggtgtcaacaagtacaaactggatcacgaagacgaaaccgatgtacttgagatcgacaacgtgatggtgcgtaacgagcaaattgctagcctggaacgcattcgcgccacccgtgatgatgccgccgtaaccgccgcgttgaacgccctgactcacgccgcacagcataacgaaaacctgctggctgccgctgttaatgccgctcgcgttcgcgccaccctgggtgaaatttccgatgcgctggaagtcgctttcgaccgttatctggtgccaagccagtgtgttaccggcgtgattgcgcaaagctatcatcagtctgagaaaagcgcctccgagttcgatgccattgttgcgcaaacggagcagttccttgccgacaatggtcgtcgcccgcgcattctgatcgctaagatgggccaggatggacacgatcgcggcgcgaaagtgatcgccagcgcctattccgatctcggtttcgacgtagatttaagcccgatgttctctacacctgaagagatcgcccgcctggccgtagaaaacgacgttcacgtagtgggcgcatccagtctggctgccggtcataaaacgctgatcccggaactggtcgaagcgctgaaaaaatggggacgcgaagatatctgcgtggtcgcgggtggcgtcattccgccgcaggattacgccttcctgcaagagcgcggcgtggcggcgatttatggtccaggtacacctatgctcgacagtgtgcgcgacgtactgaatctgataagccagcatcatgattaatgaagccacgctggcagaaagtattcgccgcttacgtcagggtgagcgtgccacactcgcccaggccatgacgctggtggaaagccgtcacccgcgtcatcaggcactaagtacgcagctgcttgatgccattatgccgtactgcggtaacaccctgcgactgggcgttaccggcacccccggcgcggggaaaagtacctttcttgaggcctttggcatgttgttgattcgagagggattaaaggtcgcggttattgcggtcgatcccagcagcccggtcactggcggtagcattctcggggataaaacccgcatgaatgacctggcgcgtgccgaagcggcgtttattcgcccggtaccatcctccggtcatctgggcggtgccagtcagcgagcgcgggaattaatgctgttatgcgaagcagcgggttatgacgtagtgattgtcgaaacggttggcgtcgggcagagcgaaacagaagtcgcccgcatggtggactgttttatcagcttgcaaattgccggtggcggcgatgatctgcagggcattaaaaaagggctgatggaagtggctgatctgatcgttatcaacaaagacgatggcgataaccataccaatgtcgccattgcccggcatatgtacgagagtgccctgcatattctgcgacgtaaatacgacgaatggcagccacgggttctgacttgtagcgcactggaaaaacgtggaatcgatgagatctggcacgccatcatcgacttcaaaaccgcgctaactgccagtggtcgtttacaacaagtgcggcaacaacaaagcgtggaatggctgcgtaagcagaccgaagaagaagtactgaatcacctgttcgcgaatgaagatttcgatcgctattaccgccagacgcttttagcggtcaaaaacaatacgctcagtccgcgcaccggcctgcggcagctcagtgaatttatccagacgcaatattttgattaaaggaatttttatgtcttatcagtatgttaacgttgtcactatcaacaaagtggcggtcattgagtttaactatggccgaaaacttaatgccttaagtaaagtctttattgatgatcttatgcaggcgttaagcgatctcaaccggccggaaattcgctgtatcattttgcgcgcaccgagtggatccaaagtcttctccgcaggtcacgatattcacgaactgccgtctggcggtcgcgatccgctctcctatgatgatccattgcgtcaaatcacccgcatgatccaaaaattcccgaaaccgatcattagcatggtggaaggtagtgtttggggtggcgcatttgaaatgatcatgagttccgatctgatcatcgccgccagtaccagtaccttcagtatgacgcctgtaaacctcggcgtcccgtataacctggtcggcattcacaacctgacccgcgacgcgggcttccacattgtcaaagagctgatttttaccgctagcccaatcaccgcccagcgcgcgctggctgtcggcatcctcaaccatgttgtggaagtggaagaactggaagatttcaccttacaaatggcgcaccacatctctgagaaagcgccgttagccattgccgttatcaaagaagagctgcgtgtactgggcgaagcacacaccatgaactccgatgaatttgaacgtattcaggggatgcgccgcgcggtgtatgacagcgaagattaccaggaagggatgaacgctttcctcgaaaaacgtaaacctaatttcgttggtcattaatccctgcgaacgaaggagtaaaaatggaaactcagtggacaaggatgaccgccaatgaagcggcagaaattatccagcataacgacatggtggcatttagcggctttaccccggcgggtagcccgaaagccctacccaccgcgattgcccgcagagctaacgaacagcatgaggccaaaaagccgtatcaaattcgccttctgacgggtgcgagtatcagcgccgccgctgacgatgtactttctgacgccgatgctgtttcctggcgtgcgccatatcaaacaagctccggtttacgtaaaaagatcaatcagggcgcggtgagtttcgttgacctgcatttgagcgaagtggcgcaaatggtcaattacggtttcttcggcgacattgatgttgccgtcattgaagcaagcgcactggcaccggatggtcgagtctggttaaccagcgggatcggtaatgcgccgacctggctgctgcgggcgaagaaagtgatcattgaactcaatcactatcacgatccgcgcgttgcagaactggcggatattgtgattcctggcgcgccaccgcggcgcaatagcgtgagcatcttccatgcaatggatcgcgtcggtacccgctatgtgcaaatcgatccgaaaaagattgtcgccgtcgtggaaaccaacttgcccgacgccggtaatatgctggataagcaaaatcccatgtgccagcagattgccgataacgtggtcacgttcttattgcaggaaatggcgcatgggcgtattccgccggaatttctgccgctgcaaagtggcgtgggcaatatcaataatgcggtaatggcgcgtctgggggaaaacccggtaattcctccgtttatgatgtatagcgaagtgctacaggaaagcgtggtgcatttactggaaaccggcaaaatcagcggggccagcgcctccagcctgacaatcagcgccgattccctgcgcaagatttacgacaatatggattactttgccagccgcattgtgttgcgtccgcaggagatttccaataacccggaaatcatccgtcgtctgggcgtcatcgctctgaacgtcggcctggagtttgatatttacgggcatgccaacagtacacacgtagccggggtcgatctgatgaacggcatcggcggcagcggtgattttgaacgcaacgcgtatctgagcatctttatggccccgagcattgctaaagaaggcaagatcagtaccgtcgtgccaatgtgcagccatgttgatcacagcgaacacagcgtcaaagtgatcatcaccgaacaagggatcgccgatctgcgcggtctttccccgcttcaacgcgcccgcactatcattgataattgtgcacatcctatgtatcgggattatctgcatcgctatctggaaaatgcgcctggcggacatattcaccacgatcttagccacgtcttcgacttacaccgtaatttaattgcaaccggcagcatgctgggttaatgactcgtcccgtcacgatcttcagcaatatgctgaagcatcgtggcggtataacgatgatttctgatactataaagatattcctgcatatacatcggcctgtgcggtgcatcaaaatatttcagcgttgccggattcaccagtcgccaggcaaaatgcgggatcaccgtcagaaaatgtccgcgctccacggcgctgattttggccataaaactgtagggacgataaataatggttggattgatcccacaaggtcgcatattcgcatcaatcattgcttcgaagttggcccggttctgaaagcgcatttgtagccagggcagctcctgaagcagctcttgctcttgtcgctcttcataacggcgagaaacgagaaagcctaatcgcagcggtggtagttcactgatagtcaggttttccagttcctgaactcgtgcagatacatgctgtggggagataataaaatctaactggcggtcaaaaagattatcgataacgccattttcgctgaactcaactggctgggcggtcacgccttcatacttatctccgagactaatcaactgatcgaaaataattgtcggataagtattatctatgccaatcacaatttctcgactacgacgcccactgttatggatttcattatcaatcgcagaaagccgttgataaaccgggaacagtttttgatacagttcctgtccggctttattgaggctgatattattatctttgcgggtaaatagcgtatagccaatttgttcttccagcgcggcaatgcttttaccaaatgggctagccgtcatatggattttttctgccgcccgggcaatattattggtttgcgctaataaaatgaaattgcgcatctttttgctaataaaaatgtccatccccctcccccgcatccttgtccgcttaaccgtttcagtcagcctatccttgatgaaaccgcgagcaaagataggtgattacgtcatggttttacagaaaattacagaaaaaggaggcaatatcgggtaaaggcattagcccgacgaatacgtcgggctacaaatattattgtgctgcaggtgttttagcgggttgttgatccacaggttctaactggaagaccacatcgacctgatcatcaaactgaatagcggcctgctcgtaagtttcctgggcggacaccggcgcggcatcggctttcatcatccgcaccattgggctgggctgatagttggaaacatggtagcgcacgctatataccggccccagtttacgatgaaagccgttcgccagttcctgcgcctgatgaatcgcgttatcaatcgctgccttacgcgctttgtctttataggcatccggctgcgccacgcccaggctcacagaacgaatttcgttaagacccgccttcagcgcgccatccagcaaggaattcagtttgtctaactgacggagcgtgacttccaccgttctcacagcgcggtagcctttaaggatacttttaccatcctgataatcataatctggctgggtgcgtaagttcgcactgctgatatcttttttcgcgatctgattgagttcaaggaaggaaatgtattgtgcgacgcgctcatctgcctgtttcttggcagtagcggcatccttcgcggccacgttaacttcaatcgcaagagtggcaatgtctggcaccgcatccacgcttgccgtaccggaggtgacaatatgcggtccatccggcaattcgttagcctgcgctgccatcccgctaatacccattaatgccgccagggcgataactttgaacttcacgttagtctctccgtgttaattgacttgcccaaaattcaggacctctggaggcaagcttagcgcctctgttttatttttccatcagatagcgcttaactgaacaaggcttgtgcatgagcaataccgtctctcgccagctgcaaggcaataaaccacataacacatcccacaaccagattgataatgcgctgtgcttttgccgtgcgcagacgcggtgccagccaggctgcgagaagagccagaccaaagaaccacaggaaagaggcgctaattgtcccgagtgcaaaccagcgttttggttccacatcaagttgcccgccaaggctgcccagtacaacaaaagtatccaggtaaacatgcggattcagccaggtcactgccaacatggtggcgataattttccatctgccttgcttcatgacttcggcgctggctaactcaatattactgctcattgctgttttaaaagcgccaaaaccataccacagcaagaaggctacgccgccccaggtgaccagcgccagcaaccacgggctctgcatcaataacgcgctgccaccaaaaatcccggcgcaaatcaggaccaaatcgctgatagcacaaagtaaggcaatcataatgtggtactgacgacgtatgccctgattcatcacaaaagcattttgtggaccgagcggtaggatcatagccgccccaagtgcaagaccttgaaagtaataagaaaacacgttggatattccgaattaagtatctgatgcagagactatatcgcgggattgttattagcggaaattgataatattaattggcaatcagaaaaactaataagagagaggccagagagtattatctggcctcagcgttgattacgcagctttgtcttctttcacccgcttaaagttcacatccatttgcgggtacgggaagctgataccggcggcatcaaattcacgtttaatacgctccagcacatcccagtacacgttttgcagatcgccgctgttgctccagacgcggaccacgaaattaatgctgcttgcaccaagttcgttcaggcgcacagtcatttcgcgatctttcaaaatgcgatcttcagactggataatattggtcaggatctgcttaacctgatcgatatcggaatcatacgccacgccaataataaattcgttacggcgaactggctcgcgggagaagttaataatatttccggcaataattttaccgttcggaataacgataattttaccgtctgcagtacgcatggtggtggagaaaatctgcacactcagcacagtaccggctacgccgcccaggtcaacatattctccggcacggaacgggcggaacatgacaagtaacacgccagcggccaggttagacagactcccctgcaaagccagaccaacagctaagcctgcggcaccgagtacagcaatgacactcgcggtttgtacacccacgcgtcccagtgcagcgattagcgtaaaggcgataataccgtaacggactaatgcagaaagaaaatcagcaacagtggcatcgattttacgggagatcatcaggcgattcaccgcgttggaaatcatccgcgcgataatcaaaccaacgatgatgatcgcgagtgccgccacgatgtttactgcataacttagcagcagcgcctggttagctaccagccagcttcccgcgccgtttatgctatcgacaacattcaaatcttccattcaatattccttttcaactgactcaaaatggagaaatacactccgccgccttatgacgggcagtctgacaagggtaaacaataaagcataattttgccaaatagatcacagatttctcatctgaatcaccttgcttttggcgaaaaaatccccgcagagcggggctcagacagatatcaatgtgcgctttgtcatgccggatgcggcgtgaacgccttatccggcctacaaaaacctgcaaattcaatatattgcaggatacgtgtaggcctgataagcgtagcgcatcaggcaattttgcttttggcgaaaaaaagacccgcagagcgggccttgagataagcagaaaggaatatcttacagaacgtcgatcgcgttcagttcctggaatgctttctccagacgagcgatcatgctagtctgaccggcacgcagccatacgcgcggatcgtagtatttcttgttcggctgatcttcgcctttcgggttacccagctgaccctgcagataagcttcgttcgctttgtagtagttcagaacgccttcccaggttgcccattgggtatcggtatcgatgttcatttttactacgccgtagcttacggagtctttgatttcctgagcagtagaaccggaaccaccgtggaatacgaagttcaggctgttgtgcggcaggttgtgtttcttggaaacatattcctgagaatcacgcaggatggtcggagtcagaaccacgttacccggcttgtaaacaccgtgtacgttaccgaaggacgctgcgatggtgaaacgcgggctgattttgctcagttcggtgtatgcgtaatcaacgtcttccggctgggtgtacagtgcagaagcgtccatgtggctgttgtccacgccgtcttcttcaccaccggtgcaacccagttcgatttccagagtcatgccgattttggacatgcgctccaggtatttagagcagatttcgatgttctcttgcagagattcttcagacaggtcgatcatgtgagaagagaacagcggcttaccggtagctgcgaagtgtttttcacccgcgtccaacagaccgtcgatccacggcagcagtttcttcgcgcagtggtcagtgtgcaggataaccggaacaccataatgttcagccatctggtgaacgtgatgcgcaccagagatcgcgcccaggatagcagcaccctgcggaacgtcagatttcacgcctttaccagcgataaaggaagcaccaccgttggagaactgaacgataaccggcgctttaactttagcagcggtttccagtacggcgttgatggagtcagtaccgacgcagtttactgctggcagtgcgaagttgttttcttttgctacctggaaaactttctgtacgtcatcaccagtgattacgccaggttttacgaaatcaaaaatcttagacatgtctcttgtcctgtatcgtcgggccttatactcgtcatacttcaagttgcatgtgctgcgtctgcgttcgctcaccccagtcacttacttatgtaagctcctggggattcactctcttgtcgccttcctgcaactcgaattatttagagtatgaaaaattgcgtgctctaaaagcgcgctgaaacaagggcaggtttccctgccctgtgattttttacttcttagcgcgctcttcgagcatcgctactgcaggcagtactttaccttccacgaattcgaggaatgcgccgccgccagtggagatgtaggagattttgtcagcaatgccgaacaggtcgattgctgccagagtgtcgccgccgccagcgatggagaacgcttcgctgtctgcgatagcgttagccacgatttcagtacctttgcggaagttcgggaattcgaacacgccaaccggaccgttccacagaatggttttcgcattcttcaggatttcagccagttcctgagcggaagcatcaccgatatccaggatctgctcgtcagctttcacatcgttaacagatttcagggtagccggtgcagtttcagagaactcggttgctacgcgaacatcagacggaaccgggatgttgcaggtggtcagcagacgtttagcttcgtcaaccaggtcagcttcgtacagggatttacccacatcgtggccttgtgccgcgataaaggtgttagcgataccaccaccaacaatcagctggtcagcgattttagacagggagtccagaacggtcagtttggtagatactttagaaccaccaacgatagccaccatcgggcgagcaggttctttcagtgctttacccagcgcgtccagttcagctgccagcagcgggcctgcgcacgcaacgtcagcgaatttaccgataccgtgagtagaagcctgcgcgcggtgagcagtaccgaatgcgtccattacgaacacgtcacacagtgcagcgtattttttggacagggtttcgtcgtctttcttctcgcctttgttgaagcgaacgttttccagaacaaccagttcaccttcagcaacgtcaacgccgtcgaggtaatctttaaccagacgaaccgggttagacagtttgtctttcaggtagttaacaaccggcagcagagagaattcttcgttgtactcgccttcggtaggacgacccaggtgggaagttaccatcacttttgcgccttgtttcagggccagttcgatggtcggcagagaagcacggatacgcgcgtcgctggttactttcccgtcttttactggtacgttcagatccgcacggataaatacacgtttcccagcaagatccagatcggtcatcttaattacagacatggtgaatcctctcgttgattctaaaagttttgcagacgctgcttgcgtcttacctgaaagcaacagtagccatagctaacgtcgtgtcgagcattcggttagcaaagccccattcgttatcgcaccagaccaacgttttgatcaggtgtgcgccactgacccgggtttgggtgccatcgacaatggcactgtgcggatcgtggttaaaatctacagagaccaacggcaattccgtatagtcaactataccatgaaatgcaccttgtgctgctttttgcagcaacaggttgacttcattggcttttacaggtttcttcaccgtcacgcttaaatcgattgccgtcacatttatggttggcacacgtaccgcaatcgcttcaaagcgatcgttaaattgcggaaaaaatcgtgtgataccggcggccagtttagtatcgaccggaatgatgctctggctggctgcccgggtgcgacgcaggtcaggatggtatgcatcaataacctgttgatcgtgcatggcggagtgaattgtggtcacagtgccggactcaataccgtacgcatcatctaacaatttgatgacgggaattatgcaattcgtggtacaggaagcgttagaaacgatgcggtgttccgcacgaagttgatcctgattgacgccgtaaacaacggtcgcgtcgagatcgttactgccaggatgactaaagagcacttttttggccccggcggcaatatgcgcttcgccatgctcgcgggagccatatacgccggtgcagtcgaggactacatcaacgccaagttcacgccaggggaggctttgcagactacgttcatgcaatacgcggatggcgtcatcaccaacaaaaagttgatcgcgttcctgtcgtacttcccatgcaaaacggccatggctggtgtcatatttcaacaaatgcgccatgcccgcagcatccgccagttcgttgattgccaccacggtaatttccgcccggcgtccggattcatacaaagcacgaaccacattacgcccgatgcgaccgaagccatttatcgctacgcgtacggtcatagatctcctgcaaggttttccctgagcaaatttgccagacagagtaatccagcaaatcgtccggggaaaccttacctgtcgcaaactgcgactgattggttaattgtcgaacatttaatcgactgaaacgcttcagctaggataagcgaaacgtggaataaaaggaatgtttgtccagccgaagaagacatttatctgactcacatcacacttttatccccttttgtgggaagctttattccaggctggcgtaataataaccctacaataactggaataaattgtcagcttgtgaagtgataccggccttcttcagtcatctctactatcagattggcctgacggctattcatcagcacacgctcgacattggggccatcggtgcgggcataaaatgcttcggctacttgccgcgttaatcctcccgcaattttacgactaatcaagcgctcccgcagaatttgagcaggtgcatgaataaaaatagaaaaatcgcagaaagatgccaactccagccacttttcatcatccagtaacaaccagtttccttcgacgatgacgagtggtgcggtaacgtgcaacgcatcttcaacaggatcatgcttttgtcgatcgtactgcggccacgtacaatccccttccacgacctggcgcagattttccgtcagtttcgcaacgtcaaatgtctctggtgcgcctttgaaggggcgcaattgatgcgcatccagccagctattgtaatggtgaaaaccatccatcgggagcgtctgaatagcgggcagttccgggtcttgttgcgcgagatattcccagaaggtggttagggtacttttacccgtccccggcggagcgcaaagaaaaaccaccgtacgccgctgcggatttaccgtctgtaaggccgccaacatgtgcagcaacggtttatgtacattttcaatctcttcgttctggtactgtgcctgtatcttcagcccattcaccgttaattcaattttcacggcgttaattcctttaaggtggtcgttactgccagcgtcagcgccgttttgaccattccgctaaaacgcgcctcactccagacggagaaatcagcgaacttcatcgcttttaacgcgtcatagagcatcgcattgcgggttatgctattgacgttgctgataaaatcccaggtcatgtcatcggcaaatccgggcgtttcatcctgttcgttcaggtaatgccagaactgggaaaaatgcgtgatatcggcgtacaaccatttatccattttcccaacgcataaatcaaacgcagtgcaacatcaatatcgtcaagcgggccgctttgggcgagtaacggcttcactgcatattccacgatctcttcatcgttatcgacaaacaggctcggcagaaactggcgtatcccctggagcaaaatggtatgcgcagttttcataaaactaaataaattgtcctgtgcatccagttgctcaagcacatcatcttctgtcagcgtcgccattggtcttccgatagatcaccatcaatgcagggagtctattatattacacgtttggtccgcgccgccgatcagtaatgtctgcgtccgcaccccattcgccgtctgttggataccgttcaccagctcaccgcccgtcacgcccgtagcgctaaagaggatatcgttccccctcaccagttcatcgaggctgtacacacggttaacgtcaacgcccattgccttgcaacgcttgcgctcctgctctgcaatctgccgattttccgtgtaatcccctttagcctggcaaaagtcaatcagctcggcctgcatatccccgcctaatgctttaacggcacaggcagaaatcacgccttctggcgcaccgccgatggtgtacatcacatcgtaaggattatcctgccagcaggtcagcacgctggcggcgacatcgccatccggcagggcaaaaaccttcacgcccagctgtgttgcttcctcaatcgcggcactcaggcgcggtttatccagcgtaaccatgcgcagcttatccagcggtttgcctaacgctttcgccacgttgcgcaggttgtccgtcagaggcaaagacagatcaatcgcgcccgccgccagccgattaacaaccagctttttcatatacatatcgggcgcatgtaacaggctatctcgaggggcgaaagccatgaccgccagcgcattgctctgccccatcgccaccatccgcgtgccttcaatgggatcaaccgcgatatcgacttctggcccatcgcctttgcccacctcttcgccaatccacagcatcggcgcatggtcaatttctccttcgccgataaccactcgtccacgaaaagcgacgtcgtttaatgcctggcgcatcgcggtgaccgccaggccatcaattttatttttgtcgccacatccggtttgcggccaggcagccaacgctgcctgttccgtaacgcgaaataatggccacgccagggacatcattgcgcggcctccccgatatcaacgccaaattgtgccagcagatatttctcggcctgttcattccagatgccgtgcgtttcctcaaccagccgcgccaactctttaaacagcggatcggttttgcctttttcggcaaaatcggcaatggcagtgagcggcatggtcacgccgttataaatgagttttttaccgccagggatatccggcagattgagcacggtttctggcaccgcatccaggccaccgatatgggtcaccataaagctcggctgtaactgcccagtggcgctaagggcaatcgcctctttcatgtcgtccgtactaccgccagatgtaccgacgacgtgcgtgctgttgtaatggacgttgtagaaattaaacggcactttgaagtttttatccgtcggcccggcaaagaagttcagacagccatcttccgccagtaattcatcagccatctcaacgacagcaggcaccgccgcataaacaaaaatgtcatcgaacccggcatctcctgtcagcgcccgcagcatctggacaggatcgctcatccctttggtattcacatacaccagctcaatgcctttactggccgccagttccaccggcagcagcttctgtacctgcgccagacgtttgtcgtcgatatcgaccaccaccacccggctcggttgtatgccgccgttaatggcgtaatcgatagcgccaatgcccatcggacctgcacacgccagcagtgcaatattgccgccaggtttgacgcccatgcgatgctcataaacatattgcgtggtgtgataattggcatgataagcaccaataatgcagcacataggctctgccaggctcgccgcagcaaaataagagccgtgatacggtaatacgcagcccaaattaatggcgatttcgggaataatcatataagtggcattgccgccaaaatattcgtagctgtagcccgcactatatccgcttggtaaccccatcgccggttgcaatacaaaacgctggccttttttatatttgccagtgagatttttacccacttcgacaataaccccggcacattcatgcccggtaatgaccggatgattttctaaatcgtcgggtacgcgtttatgttcactaccgagtaacgccgctttccaggtgcttaaacagacgctgtcagaaattacactcaccagtaattcattatcggtaatttctggcagttcaaatacgcgcagacggacatcccgcttgccataaatagcagcaactttggttttcatttttacctctgtaatcagtgtttatgttcggcggttaattgattaaataaagtgtcgagttttggatcgccaatatagttattaatcaatatcagtggtttatccgtcacacgtttcacgcgcccttccagactggcatgagtaacgacgatatccgcatccgcaggcacgttttctatggcgtaatgttttacttcaattgccagccccgctttttccaggcgtttacggaaggtggtcgcgcccatcgcactggagcccatccccgcatcgcaaacaaaggcgatacgcttaaccctgcttaagctgaatgcaccctcttgtttcatcgccttaaccgcattggcactctgagcaaactcatcttcgctctccgtttccaccgttttttccatcttcagtatcaggctagtaatagcaaaggacaccagggtacctaccgtaacaccggcaattgtcgccaggaagctgcctttcggcgtcagtgccaggtaagcaaagatagaccccggacttgggccagccaccagaccaccgtccagtaagttaaacatccaggtgccagacataccgcccgcaatcatggcaataatggtcagcggcttcatcagcacatacgggaaatacagttcgtggatcccaccgaggaagtgaataatcatcgccccgggcgcagaacgtttactcatccctttaccaaacaaggtaaacgccagcagcagccccaggcccggacctgggttagaggccaccataaagaagatggatttaccgttaacgctagcctgttgcattcccagcggataatagacgccctgatcgatcgcattattgaggaaaagcactttcgccggttcattgatgacactcaacaatggcagataacccgcatgtaccagcgcctcaatacactctttgacgaaagtattggcaattaacaccgccgggccgataacttcaaaacccagcagacaaaggagcatccccgcgatacctaaactgaagttattgataaccatctcaaaaccggcaggtatgcgtttttccagtgccttatcgacatattttatgaccaacccaccgagcggccccatgatcatactgccaaggaacatcgggatctctgcgccaacgatcacaccaatagtacctattccgcccatgaccgccccgcgtttaccgccgaccagatgaccacctgtagaaccaatcatcacgggcaataaataggtaatcatcgggccgacaattttggcgaaatgttcgttaggcagccaaccggtgggaataaataacgcagtaataaaaccccaggcaataaaagcaccaatattggggatgaccattgcagtcaaaaagcccccaaaagcctggacctttgcacgagcagacttgttttccataatattatcctgtagaggagagagtaattatccgcggctgataatgtccgctaattgtttttcactacttgctgttaagagttgttcgagtatttcttcttcgcacagtaattcacttaacgcctgaatagcgccaatgtggctatcggcatcggcagcagagagtccgatgagtaatttaattggttcgtcattccccggaaaataaacaccttgttcaagtaatgtcaaagacatcccggttttaagcgccccacattccggtcgcgcatgaggcattgccacgcctggtgcgagaatataataagggccattgttaatggtggaatctttaattgcctgaatgtaattctcgctgatatagtttttatccagcaaacttaccatgctgaaatcgatagcttcctgccaatcttttgcactatgtataacactgatactactttctggaaaataatcactaagccgcataaattatccttattttatttttagggtaccgtccggcggtaaaaataaaatactcgtgcggtttaatgaaagcaattgagcagggaaaccggtgttttgaaaacagtgaattattaatttcttatataacattgagttatagatataacaacaaatgtcaatacgcatatcgtgatgcatattacataattgatatttattgcatataaatatttgtgatctacaacacgccttatctattgcttgtccgcaaacggacatatcaaggtaataaaaaaggtcgccgaagcgacctttttacccgaaatgctaattacagcagttcttttgctttcgcaacaacgttatcaacagtgaagccgaactcttcaaacagcagctctgccggagcagattcaccgaaggtggtcataccgacgatagcaccgttcaggccaacatacttgtaccagtagtcagcaatacccgcttctacagcaacgcgtgcagtaaccgctttcggcagtacggattcacggtaagcagcatcctgcttgtcaaatgcgtcggtagacggcatggacaccacgcgcgctttcacgccttcggcagtcagtttttcgtaggcagcaacagccagttcaacttcactaccggtagcgatgaaaatcagttccggctgaccggcgcagtctttcagcacataaccaccgcgcgcgatgtttgccagttgctcttcagttcgttcctgctgcgccaggttctgacgggagaggatcagtgcggtcgggccgtcctgacgctcaacaccgtatttccacgcgaccgcggattcaacctggtcacacggacgccatgtagacatgttcggggttacgcgcagagaagcgacctgctcaaccggctggtgagtcgggccgtcttcgcccagaccgatggagtcgtgggtgtaaaccatcacctgacgctgtctcatcagcgcagccatacgtacggcgttacgtgcgtattccacgaacatcaggaaggtggaggtgtacggcaggaagccaccgtgcagggagataccgttagcaatcgcggtcataccgaactcgcgaacaccgtagtggatgtagttacccgcagcatcttcgttgattgctttagaaccagaccacagggtcaggttagacggcgccaggtcagcagaaccgccgaggaattccggcaacagcggaccgaacgcttcgatagcattctgagacgctttacggctggcgattttcgccggattagcctgcagtttagcgatgaactctttcgctttagcgtcgaagtcagacggcatttcgcctttcatacggcgggtaaattcagcggcttcctgcggataagctttcgcgtaagcagcgaatttctcgttccatgcggattctttcgcctggcctgcttctttcgcatcccactgagcatagatttcagacgggatttcgaacggcgcatatttccagcccagttgttcgcgggtcagggcaatttcagcgtcgcccagcggcgcaccgtgggagtcgtgggtaccggctttgttcggggaaccgaaaccgatgatggttttgcacatcagcagggaaggtttgtcagtcactgcgcgcgcttcttctactgcgcgtttgatagatgccgcgtcatgaccgtcgatgtcgcgaataacgtgccagccgtaagcttcgaaacgcattgcggtgtcgtcggtgaaccagccttcaacgtgaccatcgatagaaataccgttgtcatcgtagaatgcaatcagtttacccagcttcagcgtacccgccagagagcaaacttcgtgggagatgccttccatcatgcagccgtcgcccatgaaggcgtaggtgtagtggtcgacaatgtcgtggcccggacggttaaactgcgccgccagcgttttttctgcaatcgccataccgactgcgttggcaataccctgacccagcggaccggtggtggtttccacaccagcggtgtaacccacttccgggtgacccggagttttagagtgcagctgacggaagtttttcagttcttccatcggcagatcgtaaccggtgaggtgcagcaggctgtagatcagcatggagccgtggccgttggacagcacgaagcggtcacggtcagcccaggacggattctgcgggttgtgtttcaggaaatcacgccacaggacttcggcaatgtcagccatacccataggggcacccgggtgaccggatttggctttctgtactgcgtccatgctcagcgcacgaatagcattggcaagctctttacgactggacattttgactccagatcggatgatgaagggcacgcccttaacgacttgacgacagcgcgttttgggctacgccggaaaatttgccaacaatttaccacaagccgcgcgtcatgtacatggaacatccttttgccgcttcagaaatctctggatcatgctcgcatgttgcgcaatctactcgcccgtccgctgcgcttttccttatactgagactgagcgtcgattcacctgcaaacggcgcatttttagaataatcctgaccttgtgcggaagagaaaacatgaaaattcgcgccttattggtagcaatgagcgtggcaacggtactgactggttgccagaatatggactccaacggactgctcagtagtggagcggaagcttttcaggcttacagtttgagtgatgcgcaggtgaaaaccctgagcgatcaggcatgtcaggagatggacagcaaggcgacgattgcgccagccaatagcgaatacgctaaacgtctgacaactattgccaatgcgctaggcaacaatatcaacggtcagccggtaaattacaaagtgtatatggcgaaggatgtgaacgcctttgcaatggctaacggctgtatccgcgtctatagcgggctgatggatatgatgacggataacgaagtcgaagcggtgatcggtcacgaaatggggcacgtggcgttaggccatgtgaaaaaaggaatgcaggtggcacttggtacaaatgccgtgcgagtagctgcggcctctgcgggcgggattgtcggaagtttatctcaaagtcaacttggtaatctgggcgagaaattagtcaatagccaattctcccagcgccaggaagcagaagccgatgattattcttacgatcttctgcgccaacgcggcatcagcccggcaggtcttgccaccagctttgaaaaactggcaaaactggaagaaggtcgccaaagcagtatgtttgacgaccatcctgcatccgccgaacgcgcccagcatattcgcgatcgcatgagcgcggatgggattaagtaaagcctggtggtgtcgaacgtaggtcagataaggcgttcacgccgcatctgacatgaatggcacatttgttaccttgtgcgcattgccggatgcgatgctggcgcatcttatccggcctacgggtgccgaacgtaggtcggataaggcgttcacgccgcatccgacattaatggcacgttttacccgtgcgcatcgcatctggtgcttactcgccctttttcgccgcctgaatatacagcatttccagcgccagcgttgccgctgccagagcagtgatttcgctctgatcgtatgccggagccacttccactacgtccatcccaacaatgttgagatctttcaggccgcgtaccagtttaatagcgcgatcggaggtcaggccgccaatcactggcgtaccggtgcctggtgcaaaagcaggatccaggcagtcgatatcaaaagtcaggtaaaccggcatatcacccacaatctgtttcacttgggcgataacgtcatccacgctgcgatcgttcacctggcaggcgtccagcacggtaaagccgttgtctttatcaaactcggtacgaataccaatctgcacggaatgattcgggtcgatcagaccttctttcggcgcggtatagaacatagtgccgtggtcaaattcacaaccgttcgcataggtatcggtgtgggcgtcaaagtgtaccagcgccattttgccgaaatgcttcgcatgagcacgcagcagcggcagcgtaacaaagtggtcaccaccgaaagagagcatacgcttaccggcagccagcagcttctcggcgtgcgcctgcagcttttcgctcatctcacgggcatcgccaaaggcatataccagatcgccgcagtccacgacgttcagacgctcacgcatgtcgaaattccacgggaagcggttgtgttcccaggccagattcgtgctaacctgacggatcgctgccggaccgtggcgaccacccgcacgaccagaagtggccatatcgaacggcacgccagtaatcacccagtctgcatcgctgtcatacggctggaagttcatcggcaggcgtaaaaaaccaaaggcattggaaaccagactgttatcgtattgatgacctaaggtgctcatggatggactcctattacaaagtcgatataaaaaaacccttccgcgtcgttaggcccgacgaggaagggttggatttgtcacaataaattgtggcggattatcaccgctaaattaagcggattcaagtaacacaggacttactcatcttcaagataagtataaccgtacaaacctgcctcgaactcttcaaggaactgttgttgcagttcagcatcaagatcggttttcttcacttgatcgcggaactgggttaacagcgttttcggatcgagctgtacatattgcagcatgtccgccacggtatcgccttcgtcagacagttctacttctacgctaccgtcagggaagacgaacacgtcaaccgcttcggtatcaccgaacaggttgtgcatgttgccgaggatctcctgatatgcgccgaccataaagaaaccgagcatcggcggattctctggatcgtactccggcattggcattgtcgtggcaataccgtcaccatcaatatagtggtcgatagcaccgtcagagtcacaggtaatatccagcagcacagcgcgacgttccggcacttgatccagcccttccagcggcagaaccgggaacaactggtcgatcccccatgcgtccggcatgctctggaacaggctgaagttgacgtacattttgtccgccatacgttcctgcagctcgtcgataatcggacgatgagcacggttttgcggatccagctgcttttgcacttcatggcacatgctcaaataaagctgctcagcccatgcacgttcttgcaggctaaagatgccggaagagtagccgatatgaatgtcgtgcagatccatctgactgtcgtgtaaccattcacgcagagaacggcgagttcccggttcgtgcatctcctgccaggtttcccacatgctttgcagcgcgcgcggcgcatcttctgcaggcgcggtcggcaccgtgtattcgttacgttccacgccgatgatattagacaccagcacggtgtgatgcgcagtcaccgcacgaccgctttcggtgattaccgtcggatgcggcagaccgttttcttcacacgcatcgccaatcgcccagataatgttgttggcgtattcattgaggccgtagttcacgctacagtcggactggctacgagtaccttcataatccacgcccagaccgccgccgacgtcgaagcactgaatattgacgcccagcttgtgcagttccacatagaaacgcgcggattcacgaacgcctgtcgcgatatcgcgaatattcgccatctggctaccgaggtggaagtgcagtagttgcaggctgtcgagacgcccggcttcacgcagggtttcaaccagttgcagtacctgagtcgcagccaggccgaacttgcttttttccccgccggaggactgccatttaccgctaccctggctagccagacgtgcacgcacgcccagacgaggaacgacattcagacgttctgcttcatccagcacaatggcgatttcactcatcttctcaatgaccagatagaccttgtgccccatcttctcgccaattaatgccaggcggatatattcgcggtctttataaccgttgcagacgatgacgctacgggtcatgccagcatgtgccagtactgccatcaactcggctttggaaccggcttccagacccagcggttcgccgctatgaatcagggactcaatcacgcggcggtgctggttaactttgatcggataaacaaggaagtaatcgccgttatagccgtaggattccctcgcacgtttgaacgcggcgttaatggaacgcaaacggtgctgcaggatctgtgggaaacagaacagtgcaggcagacgctggccctgtgcttcacgagttttcactaactgcgcgagatcgacgcgagcttccgggacgtccgggtccgggcacacgctaatgtggcccagctcgttaacgtcatagtagttattgccccaccaggcaatattgtaagtacgcagcatcttgctggcttcctgggagctcattgcaacctcctgcatggagcgtagtacaccgtgttcgcccgcactgctaggcaaacccatagacatgtcgtcagacatagcgaacctcaaattattttattaagtgtaaaacagttaacgactatcgcagcctggaactggcttaacaacccataagcacatggattttccagcagactatgctgacgctccaactgcgcaaccggtttctttttcataacattattaagcacataaccgaacgtaagtgtgaaagttcggcgaaaccacgagaaaactcttgtttttacaagagcgcccttgttcagtcctcagtaactgtaaccagctcttgaatcctgagaagcgccgagatgggtatagcaagcgcaggtatgcaaagcagagatgcagagtgcggggaacgaatcttcaccagaacggtgagacaggttaagcagcagacaacggttcattatttcgtaagtcctccacggccgcctgttaagacgaacccacaagccaaaactctgattagtacccggctggaagtggcaacacgaaagaaacgtcgtgtgctttttatttaagccgcgcgccgcgttttataccccacaatggcagaaaattgcaaaagataaatacgcagaatgccggcattgtcaggaaaaatttccagccacgtttttaacagaatgagacagctttcaaaaaaaagtggaaatagggtgaagaattgacctaaaatagccatccagatgttaatccatccataccgattaacactcagactgccagtgtttttaacctgcagagtcgtggtaggatccgctaccacagaaaatccacacaacagtttgagctaaccaaattctctttaggtgatattaaatatggcaaaacacctttttacgtccgagtccgtctctgaagggcatcctgacaaaattgctgaccaaatttctgatgccgttttagacgcgatcctcgaacaggatccgaaagcacgcgttgcttgcgaaacctacgtaaaaaccggcatggttttagttggcggcgaaatcaccaccagcgcctgggtagacatcgaagagatcacccgtaacaccgttcgcgaaattggctatgtgcattccgacatgggctttgacgctaactcctgtgcggttctgagcgctatcggcaaacagtctcctgacatcaaccagggcgttgaccgtgccgatccgctggaacagggcgcgggtgaccagggtctgatgtttggctacgcaactaatgaaaccgacgtgctgatgccagcacctatcacctatgcacaccgtctggtacagcgtcaggctgaagtgcgtaaaaacggcactctgccgtggctgcgcccggacgcgaaaagccaggtgacttttcagtatgacgacggcaaaatcgttggtatcgatgctgtcgtgctttccactcagcactctgaagagatcgaccagaaaagcctgcaagaagcggtaatggaagagatcatcaagccaattctgcccgctgaatggctgacttctgccaccaaattcttcatcaacccgaccggtcgtttcgttatcggtggcccaatgggtgactgcggtctgactggtcgtaaaattatcgttgatacctacggcggcatggcgcgtcacggtggcggtgcattctctggtaaagatccaagtaaagtggaccgttccgcagcctacgcagcacgttatgtcgcgaaaaacatcgttgctgctggcctggccgatcgttgtgaaattcaggtttcctacgcaatcggcgtggctgaaccgacctccatcatggtagaaactttcggtactgagaaagtgccttctgaacaactgaccctgctggtacgtgagttcttcgacctgcgcccatacggtctgattcagatgctggatctgctgcacccgatctacaaagaaaccgcagcatacggtcactttggtcgtgaacatttcccgtgggaaaaaaccgacaaagcgcagctgctgcgcgatgctgccggtctgaagtaatctttcttcacctgcgttcaaaggccagcctcgcgctggcctttttcttttggataggcgttcacgccgcatccggcaaaaaaaccgcccgcacaataacatcattcttcctgatcacgtttcaccgcagattatcatcacaactgaaaccgattacaccaaccacaacagacaaagatttgtaatattttcatattattattcggttttcacagttgttacatttcttttcagtaaagtcttaattgcagataacagcgtttaatctatgatgatataactcaattattttcatgcacttaaatcataactaagataaatgttagtgtaagcgattacactgatgtgatttgcttcacatctttttacgtcgtactcacctatcttaattcacaataaaaaataaccatattggagggcatcatgcctgacgctaaaaaacaggggcggagtaacaaggcaatgacgtttttcgtctgcttccttgccgctctggcgggattactctttggcctggatatcggtgtaattgctggcgcactgccgtttattgcagatgaattccagattactagccacacgcaagaatgggtcgtaagctccatgatgttcggtgcggcagtcggtgcggtgggcagcggctggctctcctttaaactcgggcgcaaaaagagcctgatgatcggcgcaattttgtttgttgccggtagcctgttctctgcggctgcgccaaacgttgaagtactgattctttcccgcgttctactggggctggcggtgggtgtggcctcttataccgcaccgctgtacctctctgaaattgcgccggaaaaaattcgtggcagtatgatcagcatgtatcagttgatgatcactatcgggatcctcggtgcttatctttctgataccgccttcagctacaccggtgcatggcgctggatgctgggtgtgattatcatcccggcaattttgctgctgattggtgtcttcttcctgccagacagcccacgttggtttgccgccaaacgccgttttgttgatgccgaacgcgtgctgctacgcctgcgtgacaccagcgcggaagcgaaacgcgaactggatgaaatccgtgaaagtttgcaggttaaacagagtggctgggcgctgtttaaagagaacagcaacttccgccgcgcggtgttccttggcgtactgttgcaggtaatgcagcaattcaccgggatgaacgtcatcatgtattacgcgccgaaaatcttcgaactggcgggttataccaacactaccgagcaaatgtgggggaccgtgattgtcggcctgaccaacgtacttgccacctttatcgcaatcggccttgttgaccgctggggacgtaaaccaacgctaacgctgggcttcctggtgatggctgctggcatgggcgtactcggtacaatgatgcatatcggtattcactctccgagcgcgcagtatttcgccatcgccatgctgctgatgtttattgtcggttttgccatgagtgccggtccgctgatttgggtactgtgctccgaaattcagccgctgaaaggccgcgattttggcatcacctgctccactgccaccaactggattgccaacatgatcgttggcgcaacgttcctgaccatgctcaacacgctgggtaacgccaacaccttctgggtgtatgcggctctgaacgtactgtttatcctgctgacattgtggctggtaccggaaaccaaacacgttagcctggaacatattgaacgtaatctgatgaaaggtcgtaaactgcgcgaaataggcgctcacgattaatctccccaagcttcctcccatcgcggaggaagccacctcttgcagtcatcttttcttcgctctatcctctgccgctatgaaaacatcccgtctccctatcgccatccaacaggccgttatgcgtcgcctgcgggaaaaactcgcccaggccaacctgaagctagggcgtaactacccggagccaaaactctcttacacccagcgcggaacctccgccggaacggcctggctggaaagctatgaaattcgcctcaatcccgttttgctgttggaaaacagtgaagcttttattgaagaagtggtaccgcacgaactggcacatttgctggtatggaaacatttcggccgcgtagcgccacatggcaaagagtggaagtggatgatggaaaacgtgctgggtgttcccgcccgtcgtacgcatcagttcgaactgcaatccgtgcgtcgcaacaccttcccctaccgctgcaagtgccaggagcatcagcttaccgtacgccgccataatcgcgtagttcgtggcgaggccgtctatcgctgtgttcactgcggtgaacagctggttgcgaaataaccatctgaactatcaggaactttcctgatttggctgattgcataccaaaacagctttcgctacgttgctggctcgttttaacacggagaagtgcctacactagcgggattctttttgttaacccctaccccacgcgtacaaccgcgtggggagacgacgcggatttttaactatgcgtatcccccgcatttatcatcctgaaccactgaccagccattctcacatcgcgctttgcgaagatgccgccaaccatatcgggcgcgtactgcgcatggggccggggcaggcgttgcaattgtttgacggtagcaaccaggtctttgacgccgaaattaccagcgccggcaaaaaaagcgtggaagtgaaggtgctggaaggccagatcgacgatcgcgaatctccgctgcatattcacctcggtcaggtgatgagccgtggtgaaaaaatggaatttactatccagaaaagcatcgaactcggtgtaagcctcattacgccacttttttctgagcgctgcggcgttaaactggatagtgaacgtctgaacaagaagcttcagcagtggcagaagattgcaattgctgcctgtgagcagtgtggtcgtaaccgggtgccggaaatccgtccagcgatggatctggaagcctggtgtgcagagcaggatgaaggactgaaactgaatcttcacccgcgcgccagtaacagcatcaatacgttgccgttaccggttgaacgcgtccgcctgctgattggcccggaaggcggtttaagcgcagatgaaattgccatgactgcccgctatcaatttactgatatcctgttgggacctcgcgttttgcgtacagagacaactgcgctcaccgccattaccgcgctacaagtacgatttggcgatttgggctaacggagaagaataatgatcaagctcggcatcgtgatggaccccatcgcaaacatcaacatcaagaaagattccagttttgctatgttgctggaagcacagcgtcgtggttacgaacttcactatatggagatgggcgatctgtatctgatcaatggtgaagcccgcgcccatacccgcacgctgaacgtgaagcagaactacgaagagtggtttagcttcgtcggtgaacaggatctgccgctggccgatctcgatgtgatcctgatgcgtaaagacccgccgtttgataccgagtttatctacgcgacctatattctggaacgtgccgaagagaaagggacgctgatcgttaacaagccgcagagcctgcgcgactgtaacgagaaactgtttaccgcctggttctctgacttaacgccagaaacgctggttacgcgcaataaagcgcagctaaaagcgttctgggagaaacacagcgacatcattcttaagccgctggacggtatgggcggcgcgagcattttccgcgtgaaagaaggcgatccaaacctcggcgtgattgccgaaaccctgactgagcatggcactcgctactgcatggcgcaaaattacctgccagccattaaagatggcgacaaacgcgtgctggtggtggatggcgagccggtaccgtactgcctggcgcgtattccgcaggggggcgaaacccgtggcaatctggctgccggtggtcgcggtgaacctcgtccgctgacggaaagtgactggaaaatcgcccgtcagatcgggccgacgctgaaagaaaaagggctgatttttgttggtctggatatcatcggcgaccgtctgactgaaattaacgtcaccagcccaacctgtattcgtgagattgaagcagagtttccggtgagcatcaccggaatgttaatggatgccatcgaagcacgtttacagcagcagtaacccaccttagcgagaaggatctcgttgagactctgagtgacagcgcccttctttccacgcatactgggcgctgttgcttttttgaaccaggaaacagaacctctgacaatgaatttacagcatcactttcttattgccatgcctgctctccaggatccgattttccgtcgttccgtggtctacatttgcgaacataataccaatggtgcaatggggatcatcgtcaacaagccgctggaaaatctcaaaattgaagggattctggaaaagctgaagatcacgccggagccgcgtgatgaaagtatccgtctggataaaccggttatgctcggcggtccgctggctgaagatcgcgggtttattttgcatactccgccctccaattttgcttccagcattcgcattagtgacaacacggtaatgaccacttcccgcgatgtgctggaaacgctcggcaccgataaacaaccgtctgacgtattggtggctctgggttatgcctcctgggagaaaggtcaactggaacaagaaattctcgataacgcgtggctaacggccccggcagatctgaatattctgttcaaaacgccgattgccgaccgctggcgcgaggcggcaaaactgattggtgtggatattctcaccatgcctggtgtggcaggacacgcctgatgagtggaaccttactcgccttcgacttcggcaccaaaagcattggcgtagcggtcggccaacgcattaccggcaccgctcgccctttgcctgcaattaaagcacaggacggtacgccggactggaacattatcgagcgtttactgaaagagtggcagccggacgaaatcatcgtcggtttgccgctgaatatggacggcaccgagcaaccattgactgccagagcgcgtaaatttgccaaccgtattcatggccgtttcggtgttgaagtaaagctccatgacgagcgtcttagcactgtggaagcccgttccggtctgtttgaacagggcggctatcgggcgctcaacaaaggcaaagttgactctgcctctgcggttattattctcgaaagctatttcgagcagggatattaaggcgatttaaacgcctggcggagtgtaaataatatcatcgcgtcttattgccggatgcggcgtgaacaccttatccagcacacatctggcagcggctataggtctgataagacgcgttagcgtcgcatcagacatttattgcctttgtaggcccgataagcttgcgcatcgggcatggcaacgtcacaaacgcccttcccccacccggtgctgataactctgctgaaacgttatcatccccacctgctgcccggtttgaataacatgcggtaactggtgggttttcccttcgcgaatcaaattccccaccgcgggtgtgttaatcagcaattcaaatagcgccacgcgtccttcctgtttatccacttccagcttttgactcagcactgcccgtaaactacctgccagttgattacgcacggggtctttttcctgcgccggaaaactatccaccagtcgctcaactgcctgcgcggcaccacgcgtatgtaatgttgccagcaccaaatgcccggtttctgccgccgtcagtgccagacggattgtctcgctgtcacgcagctctccgagcaaaatcacatcaggatcttcccgcaatgcggcccgcaatccgcttgcgaacgtcatacagtgcaaaccaatttcccgctgctggatcaaacatcgctggctggcatagagatattcaacaggatcttccagcgtcagaatatgcgcatcggcatgttgattgagatagccaaccatcgccgccagcgtggtagatttgccactccccgtcgcccccgtcaccagaatcaggccattctcgctcttgagtaattccggcaataccgttggtgcgccaagctgttcgagctgcgggcagtggctaggtaacagccgtaacgccaggctaatgccatgccgttgcgcgaatgcgctgccacgcaatcgctggttttccgccaggctcacggcaaaatccagctgaccattctccagcaatattgcccgctgatcgtcatccagccactcccgcagtagctcttcgacgtccggcgtatcaaacggcgcagcttccattctgccgcgaatgcgccatcgtgcgggccaggcgctgcacaggtgtagatcgctgacgttatgctttacactaagggccacaatttcttccatattcatactaagatcctcggaaaatgaacgatattgcgcataacctggcacaggtccgggacaaaatcagtgcggctgcaacgcgttgcggccgttctccagaagaaattacgctgcttgcagtcagtaaaacaaaacctgcgagcgccatcgcagaagccattgatgccgggcagcgtcaatttggtgaaaactacgttcaggaaggggtagataaaattcgccactttcaggaactgggcgtaacaggattagaatggcattttattggcccgttgcagtctaataaaagccgcctggtggcagagcatttcgactggtgtcataccatcgaccgtttgcgcatcgctacccgtctcaacgaccagcgcccggcagaacttccccctcttaacgttctgattcaaattaacattagtgatgaaaacagtaagtccgggattcaactggctgaactggacgagctggcagctgcggtcgctgaactaccgcgtttacgtctgcgcgggttgatggcaatccctgcgcctgagagtgaatatgtaaggcagtttgaagttgcacgccaaatggctgtagcatttgccggactgaaaacgcgctacccgcatatcgacacgctctctctgggaatgagcgacgatatggaagccgccattgcggcaggtagcacgatggttcgtatcggcactgcaatttttggtgcgcgtgattactctaaaaaataaggaattaaaggaacgccatgaatacgttgactttcctgcttagtacggtcattgagctgtataccatggtgctgttattacgcatctggatgcagtgggctcattgtgatttttacaaccccttcagtcagtttgtagtgaaggtaacgcagccaattatcgggccactgcgccgcgttattccggcaatggggccaattgacagcgccagcctgctggttgcctatattctcagttttatcaaagccatcgtgctgtttaaagtggtgaccttcctgccaatcatctggattgccggtttactgattctgctgaaaaccatcggcctgctgattttctgggtcctgctggtgatggcgattatgagctgggtaagccaggggcgtagcccgattgaatacgtgctgattcagctggccgatccgctgctgcgcccgattcgccgcctgctaccggcaatgggtgggattgatttcagcccgatgatcctcgttctgctgctgtatgtcatcaatatgggtgtcgcagaagtattacaggcaaccggaaatatgctgctgccagggctgtggatggcgttatgaatgccgtaacagttaatgatgacggtctggttttacggctctatattcagccgaaagccagccgtgattctattgtcggtttacatggcgacgaagttaaagtcgccattaccgcgccgccggttgacggccaggccaacagtcatctggtgaagtttctcggtaagcaattccgggttgccaaaagccaggtggtgattgaaaaaggcgaacttggccgccacaaacaaattaaaatcattaatccgcaacaaatcccgccagaaatcgcggcgttaattaattaagtatcctatgcaaaaagttgtcctcgcaaccggcaatgtcggtaaagtgcgtgagctggcgagcctgcttagcgacttcggtcttgatatcgtggcccaaacagacctcggcgttgattccgctgaagaaaccggcctgacctttatcgaaaacgcgattctgaaagcgcgccatgcggcaaaagtgaccgctttaccggcaattgccgacgactctggtctggcggtagatgtgcttggcggcgcgccgggcatttactccgcgcgttattccggtgaagacgcgaccgatcaaaagaatctgcaaaaactgctggaaacaatgaaagacgtaccggacgaccaacgtcaggcgcgtttccactgcgtgctggtatatctgcgtcacgcggaagatcccactccgctggtatgccacggtagctggccgggcgtgattactcgtgaaccagcgggcactggtggctttggttatgatccaatcttcttcgtaccttccgaagggaaaaccgccgccgaactgacccgcgaagaaaagagcgccatttcccaccgtggtcaggcgttgaaactgctgctggacgctttacgtaatggttaaattacctccgctgagtctctacattcacatcccgtggtgcgtgcagaaatgcccgtactgcgatttcaactctcacgcgttgaaaggagaagtgccgcacgacgattatgttcagcatctgcttaacgatctggacaacgatgtggcttacgctcagggccgtgaagtaaagacaatctttattggcggtggtacgccgagcctgctttccggcccggcgatgcaaacgctgctggacggcgtgcgtgcgcgtttgccgctggcagcggatgcagaaattactatggaagcgaaccctggcacggtagaagccgatcgctttgtcgattatcagcgtgctggtgtgaaccgcatctctattggtgtgcagagttttagcgaagaaaagctgaaacgacttgggcgtattcatggcccgcaagaagcgaaacgcgcggcgaagctggcgagcggtttagggttacgtagctttaaccttgatttgatgcatgggctgccggatcaaagtctggaagaggcgcttggcgatctacgccaggccattgaactgaatccgccgcatctttcctggtatcaactgaccatcgaacccaatacgctgtttggtagccgaccaccggtgctgccggacgatgacgcgttgtgggatatattcgaacaggggcatcagttattaaccgcagcgggttatcagcaatatgaaacttccgcttacgccaaacccggttatcagtgccagcacaatctcaactactggcgctttggtgactacatcggtattggctgcggcgcacacggcaaagtgaccttcccggatgggcgcattctgcgtaccaccaaaacgcgtcatccgcgtggttttatgcaaggaaggtatctggaaagccagcgtgatgtcgaagccacagataagccgtttgagttctttatgaatcgcttccgtctgctggaggccgcgccgcgcgtggagtttattgcgtataccgggctttgcgaagatgtgattcgcccacagttagacgaggcgattgcccagggttatctcaccgaatgtgcggattactggcagataacggaacatgggaagctgtttttaaatagcctgctggagctttttctggctgagtaaacttgtattgccggatgcggcgtgaacgccttatccagccgacatgtggcagcggttgtaggtctgataagacgcgcaagcgtcgcatcagacgttgattgccggatgcggggtcaacgccgcatcctgctacaaatcgtgcactatatcaaacttacttaatcaccccattgcgccgcagttgttcggtatcttttttccagcgttcattagcttggttgatatcgtcaattttcatcaaaatcgcgacttttttactgtttatttcactaactttcatcgttaacggatattgccctttttcgagcgttacccagtcatcctgcaatttacggctaagtttttgactttgcagaaaagtctgtcgccgttgttcgttgatatcgaaatctcgtttctgctgaatcggcacttcataacactcttcactctgtttatgacatgccgcaatcgccggttgataaacctctttgtcatatttaaccgcgaacgcctcgctatcgttctgtttattaaactcatcacgctgttggtgaatttttttaaaggcgtcttcgcgggtcatttgcttaccgtttgcatcttttccccaatatgcatccgctgctttctgcgccgccaccatttgcttatcaagcgctttcacttccttttccagcgcaggaatgctgttcttctgggtattcaacgcagattcaagctgactaaagcgataattgaaatcttcgctattcacgatcagatatttattattcgttttgatatcgtcgaccacccgcccacgatcgctggctgccgcctgaaaagagtaaaagttcacgctccagccagacgcgggcgttcctttactggttaacatcgcgctgaattttaccggtttatctttcgtccaggtctgttcgagcagttcgtaatctgccaactgaccgacccaggtatagagatcgtcactggaagagacatcgccttccgcactccaggtggcctgattacccttagcatcaagattttttaaggtgatagcatcaagcttgagaatgccgtgatactgctttttgaattgatcttttaagatattttcagttggcggttcgccatctgcccaggcattaccagtcatcaacataagcagtgccgtgccaacaatccattgctttttcacccgaaaaacctcacgcggaataatttattccggtgattatcattagggtaattaaaattggcaatggacgtgagtctgaagtgaaaaagccccggcacgataccggggcgaggcgattagtactgattgaagatctgctggatctgctgcggatctttggtttgcgtcagagccagttgcagcagaacgcgcgctttttgcgggttcagcgtgccagaggcgacgaagccgtatttcgcatcatccacttcggcatcctgagtggtagcgcccgtcggtacgcgggaagaacgcacgactgcagtaccggttttcgcggcggtcgccagcgtgtcgaacacagatttatacaggttgccgttacccacaccagcgctaacgatgccatcatagcccgcatctaccagtgctttagccggaagatcggatgcgttagcgtagttataaacaatgccgactttcggcagttcattcagcttagagacatcgaatggcgtgtcgctggtatgcttacgtgccggggtacgctggtagtcaatcttaccgttgtgaatgtaacccagaggaccgtagttaacagacttgaaggtcgctacgtcggtggtgttggttttggtgacgtcacggccatcaagcacggtgtcattcatcactaccagcacgccacggttggcggaggctttatcagctgcggtcactaccgcgttatacaggttgaatggaccgtctgcgctcatagacgtggacggacgcattgcgccgaccatcaccaccggtttgtcgcatttcaccgtcaggtcgaggaagtaagcagtttcttccatcgtgtcggtaccgtgggtaatgacgaagccgtcggtcttatcgcagtcggtgttaatttttttcgccagtgtcagccagacattatcgttcatgtcctgggagccgatattcactacctgctcgcctttaacgttcgcaatgtcttttagttgcggcaccgcattaaccagattttctacgccaactttacccactgtgtagttagatttggttgcggagtcaccaccaccggcaatggtcccgccggttgctaaaatggtgatattgggtaatgccaatgctgcaccactaaaacccataaccagtgcggcaagtgccgtctttttgaaaaactccatttcattcctccagttacgtgaacgctacgcattatcccttagctctgtatgggaaatttgacgttaaacaatttacaacgtgaatatattttggagatctacaaagttagaggcaggtaacaaaacgaagaattaaacggcataaaaaagtattatgccgtcttaaaatagaggattattttaaattcccgaccagggctttgcggctatcttccagagtcacaacgcggctacaaacatctttgccaaactgctggaaatctttttcctgctttttccactcggtttggatactggattgcagcccccccaggcttcccagcacattctgtaatgggttaccgccgctttttcagcaccgctttcgcgcccatttcattaatgctgtcctgtaaaattccacccattgcctgattcactaattgctggccttcggcgcgaacctgatcaatggctttatagtgaaacgtcaggccatcgctgcgcgtttcaataatgcggttcatctgctctttcagctgcgcatcaagtttggtcagacggctgcgcattttgctgctttcgcccatctcctgaacgataattttatccagagcaatacgggctttctcgacgcggcttttcgcgccttcatcaatccacggcagcgtgctgcgtagttcagcctgataatccttcgcctgctcgcgctgggcggcattcagggaatattgcttaccgttatacatcacgttgccgtctggcgtgatcaccagattgccgttttcgcccttcacctgcacggtttgcgggctgacaatcacatcgtcacgcggcgtgacgctgcactggtagtcggcgtgagcggtcattgccgtcacactaagtgctgccgccagcagcattttgcgcatcatagtcttccctcaagaaaaaatcaggccagcatttgctggccccagattgataacaaagtacgcgttttccatgccggatgcggcgtaaacaccttatcccgcctactcgatcgtgcatctttccaggcctgataagcgtagcgcatcaggcagttttgcatttgtcatcgcccgtatgctttcttagtcccaccaaacgtcgaaaagttcgctggtgcgtacctcatccagtttgcgctcttccagccacttacgcacaatcgcctgatgttcttcggtgcatttgccgatttcctgcatgcagatcagaccttcccaggccagataaccgctgccgtcaaaggccagtttgttcggttcgataacctcgttaataaaatcatcaacggttttatcaatctgttcttcgcttgtaccttccgggaatcgccatgccacgctaaatcctaattcctggaattcgtcgatgtgcatttttttacgcagacgacggctacggttctttgccattatttcaccctctcgaacattaagtcccatactccgtgaccaagacgatgaccacgttgttcaaatttcgtcaccggacgacttgccggacgcggtacgtaatcattgctctcactcaggtttttataaccgtcaatagaagacatcacttcaagcatatgttccgcataaggttcccagtcggtcgccatatggaatacgccccccagctgcagtttgctttttaccagttcggcaaacggcacctgaacgatacggcgtttattatggcgcgctttgtgccacgggtcagggaaaaagagctgcaccatgcgcaaactattgtcaggaatcattttatgcagcacttcaaccgcatcgtgacacatcacgcgcaggttgcttaaaccttcttcatgcgcagaagccaggcacgcaccaacgcccggactatgcacttcaatgccgaggaagtcctgctcagggcgatctttagccattgccaccaggctcgcccccatgccaaaaccaatctcaagcgtcaccggcgcttcacggccaaaaagcgcggggaaatccagcatatcttcgctgaactcaacgcccatcaccggccagtagttttccagcgcatgttcctggcctttggtcagtcgcccctggcggcgcacaaaactacggatacggcgcagtgggcggccgttttcatcaaattccggactaatgacgtcgtttttcataaaggtttagtcgcttgtgaaagtgttctgaaaacgggcattatccaaagttagttgccggatgcaagcatgataaggccgtggctgcggaaagttccggtttacaccctgccgtcgctgtgctgcaatcttgcccccaacaacagtgaattcggtgaccatgcaagcgagccaatttagtgcccaggttctggactggtacgataaatacgggcgaaaaactctgccctggcaaattgacaagacgccctacaaagtatggctcagtgaagtgatgttgcaacaaactcaggttgcgaccgttatcccctattttgaacgctttatggcgcgcttcccgacggtgaccgatctcgccaatgcgccgctcgacgaagttctccacttgtggaccgggcttggctattacgcccgcgcgcgcaatctgcataaagcggcacaacaagtggcgaccttacacggcggtaaattcccggaaacctttgaggaagttgcagcactgccgggcgtcgggcgttccaccgcaggcgcgattctcagcctttctctgggtaagcactttccgattctcgacggtaacgtcaaacgcgtgctggcgcgctgctatgctgtaagcggctggcctgggaaaaaagaggtcgagaataaattatggagtttgagcgagcaggtgacgcccgcggttggcgtggaacggtttaatcaggcgatgatggatttgggtgcgatgatttgtacgcgcagcaaaccgaaatgtagcctctgtccgctacaaaacggatgtattgccgccgccaacaatagctgggcgctttatccgggcaaaaaaccgaaacagacgctgccggagcgcaccggctactttttgctattacagcacgaagatgaagtattgctggcgcagcgtccgccgagcggattgtggggcggtttatactgtttcccgcagtttgccgacgaagaaagtttgcggcagtggctggcgcaacggcagattgctgccgataacctgacgcaactgaccgcgtttcggcataccttcagccatttccacttagatattgtgcctatgtggcttcccgtgagcagtttcaccggctgcatggatgaaggcaatgcgctctggtataacttagcgcaaccgccgagtgttggcctagcggctcccgtggagcgtttgttacagcagttacgcactggcgcgccggtttaacgcgtgagtcgataaagaggatgatttatgagcagaacgattttttgtactttcctgcaacgtgaagcagaaggtcaggattttcagctgtaccccggcgagctgggaaaacgcatctataacgagatctccaaagaagcctgggcgcagtggcagcacaagcaaaccatgctgattaatgaaaagaaactcaacatgatgaatgccgagcaccgcaagctgcttgagcaggagatggtcaacttcctgttcgagggtaaagaggtgcatatcgagggctatacgccggaagataaaaaataaaaacagtgccggagcacgcctccggcaacttgcataaaaacaaacacaacacgcacccggaatgatgaaaaaatatctcgcgctggctttgattgcgccgttgctcatctcctgtagcacgaccaaaaaaggcgatacctataacgaagcctgggtcaaagataccaacggttttgatattctgatggggcaatttgcccacaatattgagaacatctggggcttcaaagaggtggtgatcgctggtcctaaggactacgtgaaatacaccgatcaatatcagacccgcagccacatcaacttcgatgacggtacgattactatcgaaaccatcgccgggacagaacctgccgcgcatttgcgccgggcaattatcaaaacgttattgatgggtgacgatccgagtagcgtcgatctctattccgacgttgatgatattacgattagcaaagaacctttcctttacggtcaggtggtggacaacaccgggcagccgattcgctgggaaggtcgcgcaagcaacttcgcggattatctgctgaaaaaccgtctgaagagccgcagcaacgggctgcgtatcatctacagcgtcaccattaacatggtgccgaaccaccttgataaacgtgcgcacaaatatctcggcatggtccgccaggcgagtcggaaatatggcgttgatgagagcctgattctggcaattatgcagaccgaatcttcctttaacccgtatgcggtcagccgttccgatgcgctgggattaatgcaggtggtacaacatactgccgggaaagatgtgttccgcagccaggggaaatccggcacgccgagccgcagtttcttgtttgatcctgccagcaatattgataccggcaccgcgtatctggcgatgctgaacaatgtttatctcggcggaattgataacccaacaagccggcgttatgccgtcatcaccgcctataacggcggcgcaggcagcgtgctgcgagtctttagcaatgataagattcaggctgccaatattattaacaccatgacgccgggcgatgtttatcagacgctgacgacccgccatccctctgcggaatctcgccgttatctttataaagtgaataccgcgcaaaaatcctaccgccgccgataattccattaaccgcccctgacgatgctcaggggcaaaaatgttatccacatcacaatttcgttttgcaaattgggaatgtttgcaattatttgccacaggtaacaaaaaaccagtccgcgaagttgatagaatcccatcatctcgcacggtcaaatgtgctttttcaaacactcatccgcatcacgatgtgaggaaattaacatgaatcttaagctgcagctgaaaatcctctcttttctgcagttctgtctgtggggaagttggctgacgaccctcggctcctatatgtttgttaccctgaagtttgacggtgcttctattggcgcagtttatagcagtctgggtatcgcagcggtctttatgcctgcgctgctggggattgtggccgacaaatggttaagtgcgaaatgggtatatgccatttgccacaccattggcgctatcacgctgttcatggcggcacaggtcacgacaccggaagcgatgttccttgtgatattgattaacagctttgcttatatgccaacgcttgggttaatcaacaccatctcttactatcgcctgcaaaatgccgggatggatatcgttactgacttcccgccaatccgtatctggggcaccatcggctttatcatggcaatgtgggtggtgagcctgtctggcttcgaattaagccacatgcagctgtatattggcgcagcactttccgccattctggttctgtttaccctgactctgccgcatattccggttgctaaacagcaagcgaatcagagctggacaaccctgctgggcctcgatgcattcgcgctgtttaaaaacaagcgtatggcaatcttctttatcttcagtatgctgctgggcgcggaactgcagattaccaacatgttcggtaataccttcctgcacagcttcgacaaagatccgatgtttgccagcagctttattgtgcagcatgcgagtatcatcatgagcattagccagatctctgaaaccctgttcattctgaccatcccgttcttcttaagccgctacggtattaagaacgtaatgatgatcagtattgtggcgtggatcctgcgttttgcgctgtttgcttacggcgacccgactccgttcggtactgtactgctggtactgagcatgatcgtttacggttgcgcattcgacttcttcaacatctctggtagcgtgtttgtcgaaaaagaagttagcccggcaattcgcgccagtgcacaagggatgttcctgatgatgactaacggcttcggctgtatcctcggcggcatcgtgagcggtaaagttgttgagatgtacacccaaaacggcattaccgactggcagaccgtatggttgattttcgctggttactccgtggttctggccttcgcgttcatggcgatgttcaaatataaacacgttcgtgtcccgacaggcacacagacggttagccactaattacgcaaagaaaaacgggtcgccagaaggtgacccgttttttttattcttacttcaacacataaccgtacaaccgtttcacgccatccgcatcggtttcgctataaacaccttgcagctccgggctaaatcccggcaacaaattcaccccttcttccagtgcaaggaaataacgttgaaccgccccaccccagacttccccgggtaccacgcaaagcacgccaggtggataaggcaacgccccttctgccgcaattcgcccttcggcatcacgaatccgcaccaactccacgtcaccgcgaatataagcgctatgcgcatcctgggggttcatcaccacactcgggaaactctgctggcggaacatcgctttttgtaggtctttgacgtcgaaactgacatacagatcgtgcatctcctgacacaactggcgcagggtgtagtcgcgatagcgcaccggatacttgttataaacgctcggcaacacctcaaccagcgggctgtcatcctcaatatgctgttcaaattgcgccagcatcgccaccagttgtgccagcttctcgtggctttccgccggagttaataaaaacagaatggagttgagatcgcacttctccggcacaatgccgttctcacgcagatagtgcgccagaatcgtcgccggaacgccaaagtcgctatattcgccggtttcggcatcgatacctggtgtagtgagtaacagcttgcacggatcaacaaaatactgatccgcggcatatccttcaaagccgtgccacttcgcccccggctcaaaactgaaaaaacggcggtcgctggctaacacacttgtcggataatcctgccacaatttgccatcaacaacgggcgggataaacgggcggaacagcttacagcgcgcaagaatagccttgcgcgcttcaatccctatctcaacacactcagcccacagccgacgcccactctccccttcatgaattttggcgttaacatccagtgcagcaaacagcggatagaaagggctggtagaagcatggagcataaaggcgttattcaaccgcttatgcgggcaaaaacgcgcctgtccgcggatatggttatcttttttatggatctggctcgtctgactgaatcccgcctgctgtttgtgcacgctctgagtcacaaagatccccggatcgttttcgttaagttctaacagcagcgggctgctatccgccatcatcgggataaattgttcataaccgacccacgcggaatcaaacagaatgtaatcacacagatgcccaacggtatcgatcacctgacgggcgttatagacagtgccgtcataggttcccagctgaataatcgccaggcgatacgggcgcggcaggtcggctttttctggcgcaacgtcgcgaatttgctggcgcagatactcttcattaaaacagtgcgcatcaataccgccaatgaaaccaaacgggttgcgactagcttccagatagaccggcgtcgcccccgcctgaatcagcgcgccgtgatgattgctcttatggttgttacggtcgaagagcaccagatcgccacgcgttaacagcgcattcgtcaccactttattcgctgcgcttgtgccgttcagcacaaaataggttttatcggcatgaaagactttggctgcgaatttctgcgcatctttcgcgcttccttcatgaataagcagatcgcccaattttacgtcagcgttacacatatcggcgcgaaagacgttctcaccaaagaaatcgtaaaaatggcgtccggcaggatgctttttaaaaaacgcaccatgttgatgtccagggcaagcaaaggtgctgttgcccatctcaacgtactgcgtcagcgtgtcataaaacggtggcagcaaattctcttcatactgacaggctgcggattccagctccagccactgctgctcgttgccgttgattaccgccgtaacgcccgcaggtaattcaacagcatgttcggaatacaaaaacaccggtagatgaaaaccggtgcgcttaagcaacgcaagaatgccactgcgactatccgcagcggtaatgacgactgccgcgacgtccgtaaaatcagtatctcccaacgccaccacgcgacgatgagaagaaagtcgggataccagttcactactggcggcaatattcatacttttcataagcgcaaacccgtttcggggaagtaagaataccggacaaggtggaaaaccctgccccatgagatatgggtcaaactggtcaccagctccgaccgccagacatcagtaaaagcagaaacgctctgattttactgttgtcctgcagtgagcgtgcgttaacttcaccgcatgagcagtaacatagaaagggaaacgtttcgcgcgaaacggcgataagcgagagaatgtaaggagatggcgtgcatcgggcaaactccgtacagagaggagaaaattcgcgcaatcatggcacctttcgctaaagcgtgcaagccaggactttgcgaacaaacaagccatcgacggcaccaaacggtcataataagaaaatcaaacaatacagctaacaggaactcttgtggtcatcggcccttttatcaacgctagtgcagtcttactgggtggcgttctcggcgcactgctcagccaacgcttaccggaacgtatccgcgtctccatgacaagtatttttggtctggcaagcctggggattggtattttactggtggtgaaatgtgccaaccttccagcgatggttttagctacgctacttggcgctctaattggcgaaatttgtttgctggagaaaggtgtcaatacagcagtcgccaaagcacaaaatctgtttcgtcacagtcgtaagaagccagcgcatgaatcttttattcagaattatgtcgcgattattgtcctgttttgcgccagcggcaccgggatcttcggggcgatgaacgaagggatgaccggcgatccgagtattttaatcgccaagagttttcttgatttctttacggcgatgatcttcgcctgcagcctgggtattgcggtaagcgtgattagtatcccattactgatcatccagttaacgctggcgtgggctgccgcgctgattttaccgctgaccacaccgagcatgatggcagacttcagcgccgtaggcggtttattgctgctggcaaccggattacgcatctgtggcattaaaatgttcccggtggtcaacatgcttccagcactccttctggcaatgccgctttccgccgcctggaccgcctggtttgcctgacaatgcgtgcaatatcggcaaagtgatgatagattgtgcagtctgcagtaaattgaagaaatttgattgacgagacgaggcgaatcaggtttaatgcgccccgttgcccggatagctcagtcggtagagcaggggattgaaaatccccgtgtccttggttcgattccgagtccgggcaccactaattcttaagaacccgcccacaaggcgggtttttgcttttggatctgacaataaccttcacgaaaaaaattagcttataaagtctgggggaattactctcgccacgttaacgagagtaattttattgatattaatctcctgatactttacccccgtccaaactccagccgctgcacattcaccatcccaggcttctcagcagcactgacatcaatttgtgtcacccgcagcgcatagaacgccattttgaatttacgaacggacgcattatcagtgactttaacggcatgggcaaagtgaaatatcattttttaacgataaaaagagtgttatttcttgtgtatcagacaataagcattcattcaaaacctttagaaataatcaaaacacaggtattccactggttaatatattcacatatgaaatgaataaatattggaatatataaatattgaatattttgattaatccccgtactgattattcttcataatcagtacggggttgctacaacatgtattactttttcaccacaattaacggttcaatatcactctcttttttgatgaccagactttcatcaccgcgcaaacacgtcccaccgtagttgccgccaacggtgaaggtacatacctgaatgtatttaccgtccactttcggcaaacaccacagttgctgatagatgtttttctgctcggcaaatttaccgctggttttgtccagcacctcttcatgatggctgacgaggtcgatattgctgccacagcgaccggcgatcggtttcactgcgtaacctgttttcaccagttcatcattaacagtgaaatcggtatccagcaggtaacgatggtgcgggaacaggctccagaggatcggcagaatcgctttgttgccggggatcaccgtccacagcggctcaaagaccagcacttccgggcgcagcaatacgtcgataagacgcacttcgttttgcggatgaccggtacggattggcaccgcagcaaactcacggtcgctaacttcacgaatctgatcaaacgcggtttcccacgcccaggttttccacacgcagttaaccagtcgcccttccccatcaatcagttgcccggcagcatcccagcccagttcatccaatccacgcaagatacgcgtttcaaagcccgcctggtgcagcgcctgctccataaactgcgcgtgatagttttcctcgatatctttgtcctgcatgatatggacaaacggacgtgcacgactgtgtttccaggcaccagccaattcgttaatcagcccttccgccggattgaagccgttgcctttatagccctgctccgcccaacgttcgaggatcaagcccgcttcggtatgacaggaggcggagtcggcgttgtactcgtaaaccttcaggccacgctcatccatgcagaaatccatacgaccagtgatcatatggtgacggcgacgctgccaggagagacgcaaacgtggccagaggattttcgggatgtcgaacagcgccagcaggttgtcatctttcagcaccttgtcggttgcgtgaagatacatcaggtgcagctcgttggtggctttaattagctcctgctcggcactctcggtaatggtgtagtaatgataaggatcctgattgatcacctgaccgttggcctgcacataggcgttttgcagcggatctttttcatccagccatttaccgtcaaactggcctttgttttccaggcgcgctccgctgattttcagcagctcgcctgcaatttccggctgcggtaagctgtattcagtatcttccgtctggatcatccagcccagaatggtggtgtcatcaaaagtgtctttcagggtatagcagccgttttcgaccaccatctccagctcgcgcgtccactgttgcccttgcggcaacggggaatgaatcacgttctgttccgcaatacggactttgttgccatgcaattgggtaatgatggcgacatggccagtgtctttaaattcaccgcctttatcccagataagaagcgcacccgcgaccggcgcacgcgggctgccgttaggaaatgcctgcaatggcaggatgttgtcattaaccacttctcgcaggaagcgcaggctgaaaatctcccacgccatacccacgtcagtaaagaccacaccgtaattcagaaagagaaaacggcgagcaaattcaacgcattgccacttgtggcccatatattcgtcgtcgatatagctacggaatacggcgtcatcttcgtattcctgcggatcgagagaactgtaatcactagagtagattgctaccccacctggggcgtagcccaataatgtcccgaacggggcatcctggctggtcgttcctttgctcatcactttacctttaacaatacaacctaagcagttggcgtaattgttgtgctctgattacctgctcagcgacattaaccggacagaggtcagactaatcatacacctcatcgcagcggctggcgcaaagggttaaaaaattcacattctgtacagcaagtgacctgctacactgcttcaacactaccactcagaaggcaactcactatgacagacaatacttatcagcccgcgaaagtctggacgtgggataaatccgctggcggcgcgttcgccaatatcaatcgcccggtttctggtccgacgcatgaaaaaacgctgcccgttggcaaacacccattgcaactttatagcctgggaacgccgaacggtcagaaagtaacgattatgcttgaggagctgctggcgctgggcgttactggtgcagagtacgacgcctggctgattcgtattggcgatggcgatcaattctccagcggctttgtcgaagtgaacccaaacagcaagatcccggcgctgcgcgatcatacgcataatccgccgatccgcgtgtttgaatctggtagcatcctgctttatctggcggagaaatttggctacttcctgccgcaggatttggcaaagcgtactgaaacgatgaactggctgttctggttacagggcgcggcaccgttcctcggcggtggttttggtcacttttaccattacgcaccggtaaagattgagtacgccatcaaccgctttaccatggaagccaaacgtctgctcgacgtgctggataagcaactggcgcagcataagtttgttgcgggcgatgagtacaccattgcggatatggcgatttggccgtggtttggcaacgtggtgttaggtggtgtgtatgatgccgctgagtttcttgatgcgggcagttataagcatgtacaacgctgggcgaaagaagtaggcgaacgtccggcggtgaaacgtgggcgtattgttaaccgcaccaacggaccgctgaatgagcagttgcatgagcgccatgacgccagtgatttcgagacgaatacggaagataagcgtcaggggtaagggttggtgttcgtcgcagcaagccatccaggccggataaggcgttcacgccgcatccggcaatcgtgcacaatgcctgatgcgacgctgccgcgtcttatcaggcctacgaaagctaatcatcacgcgctggtaatgtcgtaatccatttggcgcagtgcgtctaatgtggctttggcttcatcttcgtcgatgatgctcatggcaaatccgacgtgtaccagcacccactggcccagtagatcggcagggttaccttcacaaatcagggcgatattcacatcgcgcttgataccacatacttcaacctgcgcaagctggtgaatatcttcaccgacagccagcacctggcctggaacgccaatacacattattaactccggttattcaacttcaatacttttgacgatcaggctatcgccggtatcgacacgcaaccgctcgccgtgacagagcggacactgcgcatcgtgctgatgaatctccaccacctggctgcaatcccagcaccaagcctgggcgggtttatagacgatatgtaaatcgcacccttgcgccaccgttccgtggcagacaatttcaaaactaaaacggacggcgctctcctcaacgcaggagagcgcgccaatttccagccacacggcggtgacgcgcttaacatcgtgctgctccgcctgccgttggataatttcaacggcgctctggcaaagagacaactcatgcattttcgccactcctgcgaccaaacagcagggcgcgacgccctgcgtgtggtacatccggattcgtgactggcaggctaaggatcattcgtgcgcagtcatccgtcaggcgttggccctcttcaatgctcatgctgtggctaagcgggctcatcaggctacaggagagatattggctaacaccgtccagttcgccaacggtaaaggtcatagtgccatacggcagttgcagaccaattttttcactcactttgcgcagcggccagagttgatccgggccggggaagataactgcactcagcatccacggggtgatcacacaccccgtccactgaccttcgaacagcgtaaaatcagaaacatacaccggcatactaggatgcagaaaagagagatcgtgcatgctacgccgggcaatttcttcaaacgctgcctgtacttgcgccttcggggaggtctggaaacctgctatctcttcagtcatgaatcgcctcccgtgggatggcttccacgccagattcacgcagcgcagccagaacctgctcaagcgcaggttcaatcattgcttcaaccgtcggcgttaagccgatgtgtggctccaggctttccgggatcacgccgaccagggtcagctttttcggaaactcgccggtgaagcgcagggcgctcaagacgtcggccaggccaagctgatgcggagagattttgttggtaaacaacgccggaacttcttcatcccgcaggatcatcatcgttcccggcgcgttctttttgctgacaatggcatccgcaataatcaaatgatcgcgatttgccatgtcgccaagcagctccattcccgccgtgccgccatcgaggatctcaacataatccggcagaatgtatcgttgctctaacgcttcgacaatccgcacaccgatggcttcatcggtcagcaaaatattgccgacccctaagactaaaatacgcattacagaaccttcacactaaccacttcgttgccgtcagcatccactacgtgtaccgcacaggccatgcacgggtcaaaggagtgaatggtacgcaccacttccagcggtttattcggatcggcaaccggtgtacccaccaggctctgctcgtaaggaccgacgtcatcattgaagttacgcggaccagagttccaggtacttggaacaaccgcctggtagttgctgatgataccgtctttaataaccatccagtgagagagcataccgcgcggcgcttcgaggaagccaacacctttgaattcacccgttgccggaatgttcggcttcacaaaggtggtgtgatcgcctttgccgatattggtgatcagtgcactgtattggttttgcaggatatcctgcaattcacagcagtgaacggtacgaccaataatacggcccagcgtggagtgcagctgtgccacttccagcgtgttgccagtcagtttctgataaatcgcaacgatttcattcagtttgttctgggtagattcgcgacctgccgccagtttcaccagcatattagccagtggccccacttctaccgttttgccgtagaaagtcggacttttcacccaggaatatttcccgtcgtcagaccaaccatcataagccggaatggtggtgccttcccacggtgcctgcggcgcttcgtctttataccaggagtgcttcgcgctttcctgaatgcctttgatcaggtattcatcggaatgagaagtgatcggacgatagctggacagatccgcattctcaatgtagccgcccgggaacaggaagctgccgtttttactgtcggtcgggaattccggcacgctcaggtagttcaccgcacctttaccgcgtgtcagccattccgggtagaacgcggcaataactgcggtatcaaccttataaacctgctcaacaaagtcgctcagtttgtcgatgaaagacttgatgtacatcaggcgctcaaggttcagcacgcccaaaccgtcgaggttgatcgggttcgcgacaccacctaccgccaggttctgaatgtgcggcgttttaccgcccagcagcgccacgacgcggttagcgtcacgctggcactccaacgcttgcaggtagtgcgctaccgcaatcaggttcacttccggcggcagtttcatcgccggatgaccccagtagccattagcgaaaatacccaactgaccgctggcaaccagatctttgatcttgttctgaactttggtgaactcttccggactgttcaggtgccaggtgctaacgcctttcagcatttcggaggctttggttgggtcagcttgcagtgcagaagtgatgtccacccagtccagcgcgctaagctgatagaaatgaacaatatggtcatgcgtggtgtgcgcagccagaatgatgttacggatgtattgcgcgttaaccggaacgtcgatattcagcgcactttctgccgcacgaacggaagacagcgcgtgagtggtagtacatacgccacagatacgttgcacaatcatccatgcatcgcgcggatcgcggtttttcacgatctcttccatgccgcgccacatggtaccggaagcccatgctttgctaacgacgccattttcgatttcgcaatcgatgcgtaaatgcccctcaatacgggttaccggatcaatagtaattctctggctcatgctttgctcgcctcatgacgattatgatcgttttgttttaaaggaggaagtatcggcagtagacgaatgagtacgatgtaagcgcaaatctcaatagccacaaaaccaatagaaatcaacagttcttcccaggtcgggaagtaggcgtaaccgccgcccgggttgaatgccaccaggctataggtcagacgccaggttgcacaacctaacagtgcgctcagtgcactcaggaacagcatgcgggaatcattacgcagcttcgccacacgcagaacgaccagcgggaagagcatcagcaggacttcaatccagaacatcacggagtagaagtcaccggcaaacgctaagctcagcttgtcgcgatagataagctcgccaaagcgcagcacgatgaaaatcgccagcaacacactgatggtgttggtcagcttaacaaacagactcttttcatccggaccgttgccacgcagacccgcctgcaccaggctaccttcaaagatgacaatgctgaagcccatgatgaacgccgtcagcaggctgaacagcggcaacatttcatagctctgccacaacggatgcaccttgtagcccgcgctgatcatcaggctccccatactagactggtgcatggtcggcagcagcgcaccgagcgcgatgatgaagaacatcaccttgtttagtcgctgtaggctcaccttccaccccagacgttcaaacagtgccggagcaaactccagtgccatcacgccgatatagatggtcatacagaccgccgtctcgaacagtacgctgttcacgttgaagtgacccggaatgtagaagtacggcaggttccagtagcgacccacgtcgatagtgatgctcaagccacccagactgtaaccaaacagactcgccaacagcgccggacgcaccagcggatggtattgcccacggttaaagacgtataccgcccacgccagcgcccagccgccacaggcaaagccggtgccaatcagcaggtcaaacgcgatccacacgccccacgggaagccgccgttcaggtcagagacagagcccagaccgaacaccagacgcttcacaatcaggagcatacagatgacgattaacggtccaaaaatcatgaccggtttactgatgattttgccgcccagcggttgtggatcatgactcatgatcgtctcctccgtcgtgattattcaactctcatgatcgtctcctccgtcgtgatggtcgtttttggtgttgcgacgaaccagcacggttaagcccgccagcacagccagtggtagcatcatgcctttatacagggtgtgttgaatattttcggaacgcgcaccggtagaaagatcgtccagtttcggcaggtcgagattttcataaggcacacccgtcagtaccagaacctgagtaccgccgccctctttctcgccgtacagatgcggataatatttcggcaccgtatgcaggtaagtgtcgccagatttcagcgtctgacgcggatagtggtattcgctgccaggcttcagcgccagacgttttttcgcctccgccatcagctcttcacgcgtaccgaaaatcaccgcgcccgccgggcacacttctacgcagccaggtagaccgcctttatcgagacgttccacacctttctggttgcacagctcgcacttatgcagcgcaccaaacgggttgttgtagtcgtacttcggcacgttgtacggacaggcgaccatgcagtaacggcagccggtgcacacatctttgtcgtaatggacaatgccggttttcggatcttttttcagtgcagagaccgggcacacagagacacagttcggatcgacgcagtgcatacactgtttcttaatgtacgcgtagccgttctcctcctggtctttgttgacccctgtgccgctggtccacacctgaatgatgttattggtatacgggctcagtttgtcgttgttgctccaggtctgttccccttgcgggttacgttcagggaaattgatatcctgacacttggtgacgcaagcctggcagcctacgcacaaggtgctgtcgtacaacatccccaggcttcccggaattggcgggcggttttcagcagccgcatgactgacagacggcagcgcgcccgtcagcaatgccccgcaggaggctgctttaataaaattacgtctgttcacggttattctccccgactgtcagcgttatctttcttttgctgacgacccagttcacgcaccgccatcacgctgacaccggcaaccaacccaaccacaccgccgagcaaaccaatagcgcctgcagagacgttgccgccctctttagcgttaacatccggtttctgactacgcggagtttgattttcgacgttggcaagctgatggatgcctttatggaagccgataccttcttcgttacagccatagcaagggtgaccaatcgccaccggccacacaccgccaacatcgcagaattgcagcgtactgcagttgccgtaagtttctggccctttacagccgaggtggtacaggcaccagccttcgcggtggccttcatcaccgaactctttggcaaaacgaccagcatcgaagtgcgggcgacgttcgcagtgttcgtgaatcagacggccataggcgaaggtcggacggtttttgtcatccagtttcggcggtttgccgtaagtgatgatgtgcgcaacggtcgcgaggaagttgtgcgggttcggcgggcagcccggaatattgataacggttttgcctggcagaacttcttgcaggctgactgcgccagttgggttaactccagctgcggcaacaccgccccacgcagagcaggaaccgatagcgataatggctgctgcgccttccgccgctttgcggatgtgatccacaatcggctcaccggcaaccatgcaataaataccgttatcttttaatgggatggaaccatccaccactaacacatactgccctttgtacttctcgagagcgttatgtttgttctcttcgacctgatgaccgaaggcggcggaaagcacttcgtgatactccagagagatagtctccagtacgaggttttctaccgttggatgcgttgcacgaagcagagattccgtacaaccggtgcactcctgcgcgccaatccagataactggcggacgctgcgggttagtaacgctttcggccatctctgcagcggctttgctacttaaccccatggtggcggctaatgctgcacaaagcttcatgaaatcacgacggttaatgccgtgagaatggatgagggtgttatctccagtcatttatagttattccgttgcgaagacctggcatatattttgcctcaatcgcaaaatcaataatgcgatcgatgcgccatttaccacacatttattatggttatcgatatcatgatactgcggcggggcgctaaaacgaagggaagaagcattagtgtaattaattaaagcaagataatacgtatgtttgatcaattttcgaggcgataaccggccataaaaaagcgcaacgtagaacaggaattattctcacgaaagaaatccattaccatctctttatccagtccatagcggcgcgtcagaatacccgcttcccaggcgctaagctggcgatctccggtcttttcgtacatccggtgactgtagcctaatacaaaaccgcgtttataatcggcacagaattttgtcacattaaccgcactgtcggcatgcgttgcttttaatcccgccattaagcctttaccaaaatggttattcatcgttcacctcattcgctatatattgtcatatatagcgatattttaggcaaagaacgacttttgcgcacgctattttttcatgcttgtttaagacgtaatcccgtaagagataaacctatcaggagagatatttatcgaaccatttcagtgtcctttgccaggcaagatcggcggcagatttgtcataacggggcgtggaatcattatggaatccgtgattaacccccggatagatatacgcctcataaaccttattattggctttcaacgccgcctcgtaagcaggccagccctcgttgattcgggtgtccagttccgcgaagtggagtagtaaaggcgcttcaatcttcgccacatcggcagtgggtgcctgacgaccataaaacggcaccgcgcaggccagttccggatacgcgacagccgccgcgttgcttacgccaccgccatagcaaaatccggtaatacccactttgcctgtcgcttgcggatagcgttgcataaactcaattgcggcaaagaaatcattcatcagtttgttggatcaacctgctgttgcagctcacgacctttatcatcatttcccggataacctccaacggaacttaagccgtcaggtgccagggcgatataccccgccttcgccactcgccgtgccacatcttcgatatacggattcagtccacgattctcatgcaccaccactacggctggcgttttgccgctcatctttgcgggcttcaccagataaccccgcacctcgccgtgaccatttgggctaggatacgtgatgtactcagcaacaatttccgggtcggtaaactctacctgagtcgccagcgcataatttggcttgagcaaatcaaacaacgctaatgccgtcatcccgcctaccgcacttcgccgcaaggttgaggaactcacgtttcgagattttcccgtgagcgtaatagtcatagtaatccagcaactcttgtgggaaatctttggcggttaaacgcggcatcgttgcactcctcagttggtgtttttttaagcaaagcataagcacgtatttttgcccagtttttcgtcactctgtgagccagactacgggatacgcgctggcgaatcgctaaactagaaacattgtttcgaaattgaacggtggaaaggagaggtcatggtctggttagcgaatcccgaacgttacgggcagatgcaataccgctattgcggaaaaagtggtttacgcctgcccgcgttaagcctcggtttatggcacaatttcggtcacgttaacgcgctggaaagtcagcgtgcgatcctgcgtaaagcgtttgatttgggcattacgcactttgatttagccaacaattacgggccgcctccaggaagcgcagaagagaactttggtcgcctgctgcgggaggattttgccgcttatcgcgatgaactgattatctctaccaaggctggctacgatatgtggcccggcccttacggctctggcggtagtcgtaaatacctgctcgccagcctcgaccaaagcctgaagcgtatggggcttgagtatgtcgatatcttttactctcatcgcgtcgatgaaaatacgccgatggaagaaaccgcctctgcgctggctcatgcggtacaaagcggtaaggcgctgtatgtcgggatctcctcttacagcccagagcggacgcaaaaaatggtcgagttgctgcgcgagtggaaaattccgctgttaattcatcaacctagctacaatttactgaaccgctgggtggataaaagcggcctgctggataccctgcaaaataacggcgtgggctgtattgcctttactcctctggctcagggattgctgaccggaaaatatctcaacggcattccgcaagatagtcggatgcatcgtgaagggaataaagttcgtggtctgacaccgaaaatgcttaccgaagccaacctcaacagcctgcgcttattgaatgaaatggcacagcagcgtggacaaagtatggcgcaaatggcgttaagctggttgctgaaagatgatcgcgtgacgagcgtattgattggtgccagccgcgcggagcaactagaggagaacgtgcaggcgctgaataatctgacatttagcaccaaggagctggcgcagattgatcagcatatcgccgatggcgagctgaatctgtggcaggcgtcttccgataaatgacctgttaataacgggcgcgcgaaccgcgcccgaatcagatcagtgattatgacgagtcagtcggtcaagatagcccatcacaaatgcagaaagcacaaacgtcagatggataatgacgtaccacatcagtttgttatccgggacatttttcgcatccataaagacgcgcagtaagtgaatggaagaaattgccacaatgctcgctgctactttgtttttcaggctcgttgcgtccattttccccagccagttcagcttctctttgttctcggagatatccagctgactgacgaaattctcataaccggaaaacatcaccatcaccagcaaaccgccaaccagcgtcatatccaccaggctcagcaacacgaggatcaaatcactttccgccatgctgaagatattcggcagtacgtgaataatctcctggaagaacttcagcgccagggcaactaacgccaggctaaggccaaagtacacgggggcaagcagccagcgagaagcatacattgcattttcaagaaaacgttccatacattcctgtcgtgtagttaaaacgggcaacagtatatcgcaattgagtaaacagcacgcaacagcaaatcaacatatacgttaaacctttgtcgcataattctgaggtttagggatcttcctggttcccttatcaacgcatcgagaacgtctacccttaaaggacgttgaacctgaagggagaaaaacgatgtctcatttaaaagacccgaccacgcagtattacactggtgaatatcccaaacagaaacaaccgacgccaggcatccaggcgaagatgacaccggtaccggattgcggcgagaaaacctatgttggtagcggtcgcctgaaagatcgtaaagcactggtgacagggggcgattccggaataggtcgcgctgccgccatcgcttacgcgcgtgaaggggctgacgtggcgatcagttatcttcccgtggaagaagaagacgctcaggatgtgaaaaagatcattgaagaatgcggacgcaaagccgttctgctgccaggcgatttaagcgatgagaaatttgcccgtagcctggttcacgaagcgcacaaggcgttaggcgggctggatattatggcgctggtcgccgggaaacaggttgccattccggatattgcagacctcaccagcgaacagtttcaaaagacctttgccattaacgttttcgcgctgttctggctaacccaggaagcgatccccctgctaccgaaaggtgcaagtatcatcaccactagcagtatccaggcataccagccaagtccgcatttactggactatgcggctacgaaggcggcgattctgaactacagccgtggcttggcaaaacaggtcgcggagaaaggtattcgggtgaatattgtcgcgccaggcccgatctggacagcactgcaaatttccggcggacaaacgcaggataagatcccgcagtttggtcagcaaacgccgatgaaacgtgcggggcaaccggcggaactggcccctgtatatgtttatctggcaagtcaggagagcagctacgtcaccgcagaagtgcacggcgtgtgcggcggcgagcatttaggttaaaaaaatgcccggttgtgaaaagcaaccgggcatcattgtgaattcactcttacctgatgtggcgaaaacgccttatccgcctacaaacgcatgaagattcaacatgttgcaatagattttgtaggcctgataagcgtagcgcatcaggcattgagcacctaatgccggatgcgtcgtgaacgccttatccggcctacaaacgcacgaagattcaacatgttgcaatagattttgtaggcctgatgagcgtagcgcatcaggcaattctactttacttcgctttggcggtttcttcgccgaccagacctatcttcaggtaacccgcctgatgcagcgtatccattaccttcatcaacgtctcgtaatcgacggttttgtccgctcggaagaagatggtggtgtctttcttgccttcggttaacgcattcaacgccgtaatcattgtttcatcggtgaccggatcgttaccgataaacatgctgttgtctgccttcacgctcagataaaccggtttttccgggcgcggctgcggcgtgctggtagaagcaggcaagttcaccttcacatctaccgtcgctaacggtgccgccaccataaagataatcagcagaaccaacatcacgtcgataaacggcgtcacgttgatatcatgcatttcgccgttatcgtcgaggttttcgttaagatgcattgccatcggatattatcctgcgcgtaatttttgtgcgacacgaaccggatgcgcagcggcgctggcttccagatccaggtcacggctttgcagcaacaatacctgcgctgcaacatcacccagcatcgctttaaagccgccaatctggcgtgcaaatacgttatagataacgaccgcaggaatcgctgccacgaggccgattgccgttgctaacagagcttctgcgatacccggcgcaacgactgccaggttagtggtctgcgtttgcgcgataccaataaagctgttcatgatgccccagaccgtaccaaacagaccaacgaacggagaaatcgcgccgatggttgccagatagccgttaccgcggcccatttgacgacccactgcggcgacccgacgctccagacggaagctggtacgttctttaataccttcgttatcgtcgctgccttcactcagttccagctcattctgcgcttcattgagcaaatgcaggcttaagcttttgctaccaaaatcagcggcgatatcgttggcctggtttaaggaacgcgcttcagccagcagttgctgctcgcgcttaaggcgacgcttctgattgaagaactctacgctcttactgaagaagattgcccaggtgactacggaggccaaaataagcccaatcatcacgcacttaacgacaatatcggcgtgctgatacataccccagacggaaaggtccgtctgcattaaattattacccactgtgtatctccaggacgcaagtcacaaaatctgcgcataataatatcaaaacgacgtcgaattgatagtcgttctcattactatttgcatactgccgtacctttgctttcttttccttgcgtttacgcagtaaaaaagtcaccagcacgccatttgcgaaaattttctgctttatgccaattcttcaggatgcgcccgcgaatattcatgctagtttagacatccagacgtataaaaacaggaatcccgacatggcggacaaaaagcttgatactcaactggtgaatgcaggacgcagcaaaaaatacactctcggcgcggtaaatagcgtgattcagcgcgcttctagcctggtctttgacagtgtagaagccaaaaaacacgcgacacgtaatcgcgccaatggagagttgttctatggacggcgcggaacgttaacccatttctccttacaacaagcgatgtgtgaactggaaggtggcgcaggctgcgtgctatttccctgcggggcggcagcggttgctaattccattcttgcttttatcgaacagggcgatcatgtgttgatgaccaacaccgcctatgaaccgagtcaggatttctgtagcaaaatcctcagcaaactgggcgtaacgacaagttggtttgatccgctgattggtgccgatatcgttaagcatctgcagccaaacactaaaatcgtgtttctggaaagcccaggctccatcaccatggaagtccacgacgttccggcgattgttgccgccgtacgcagtgtggtgccggatgccatcattatgatcgacaacacctgggcagccggtgtgctgtttaaggcgctggattttggcatcgatgtttctattcaagccgccaccaaatatctggttgggcatagtgatgcgatgattggcactgccgtgtgcaatgcccgttgctgggagcagctacgggaaaatgcctatctgatgggccagatggtcgatgccgataccgcctatataaccagccgtggcctgcgcacattaggtgtgcgtttgcgtcaacatcatgaaagcagtctgaaagtggctgaatggctggcagaacatccgcaagttgcgcgagttaaccaccctgctctgcctggcagtaaaggtcacgaattctggaaacgagactttacaggcagcagcgggctattttcctttgtgcttaagaaaaaactcaataatgaagagctggcgaactatctggataacttcagtttattcagcatggcctacagctggggcgggtatgaaagcttgatcctggcaaatcaaccagaacatatcgccgccattcgcccacaaggcgagatcgattttagcgggaccttgattcgcctgcatattggtctggaagatgtcgacgatctgattgccgatctggacgccggttttgcgcgaattgtataacattgccacttttggacaattttgcagacattttattgtgaaaagtcttaaattgttgcgtccgggatcaaggcgtcccggacgattcaggagtacaataggcagataaaggcttaaacgctgttccacaggaaagtccatggctgttattcaagatatcatcgctgcgctctggcaacacgactttgccgcgctggcggatcctcatattgttagcgttgtttactttgtcatgtttgccacgctgtttttagaaaacggcctgctgcccgccagttttttgccaggcgacagcttgttgatactggcaggcgcattgattgcccagggggttatggattttctgcctacgattgcgattctgaccgccgcagcaagtctgggctgctggctaagttatattcaggggcgctggttagggaataccaaaacggtgaaaggctggctggcacagcttcctgctaaatatcaccagcgcgccacctgcatgtttgaccgccacggtctgctggcgctgctggctggacgttttcttgcatttgtccgtacgctgctgccaaccatggcgggaatttccggtctgccaaaccgccgcttccagtttttcaactggttaagtggattgctgtgggtcagcgtggtaaccagttttggctatgccttaagtatgattccgttcgttaaacgccatgaagatcaggtaatgacgttcctgatgatcctgccaattgccttgttaaccgctggcttgttaggcacgctgtttgtggtgattaaaaaaaaatactgtaacgcctgacgattttccccgttcccggttgctgtaccgggaacgtatttaattcccctgcatcgcccgcattcttgccgcatcttcccccggcgtcacaccgaagtaacgtttaaactcacggctaaattggcttgcgctttcatagccgacgcgcatcgctgctgcgctggccttcatgccgtcatggatgatcatcatccgcgccttatgcagacggtaattcttcaaatactgcaacgggctggtactggtgacagacttaaaattatggtggaacgcgcttacgctcatgttggcttctgccgccagttgctcgacgctcaggttttcggtgtatttattctcaatccgtttcagcacgcggctaatcagactgaagtgagtctggcgactgaccagcgccagtaacgcgccgccgcaaggtccggtcagcacgtagtacagaatttcgcggatgatctgtttgccgagaatacgcgcatccagtggtcgctccatcacgtcgagtaaccgctccgccgcgcataaaatctcttcacttaacgtggcggagttaatcccgctggctgccatgctcggctggaaatgctcatcttcgccaatgtccatcaacagttcctgtaactgcaaaatatcgacattgagacgcaaccctgccagcggcacctcactcgtggcataggtttcgcactcaaacggcaacggcaccgtcagcagcaggtattcattggcatcataacgaaacacgcgttcattgatataaccgattttatgcccggaaaagagaattatgatgccaggctcgtacatcaccggtgtacgtgcgaaaggcgtctcgccatacaacaaacgcacatcgggcaacagtccactcaaactattttctttatttttcagtttattaactttatccgccagcaagcggcaaatctcttcacgtttcatatcgcgtaatttcttaggaataatgcggcaattactttgtgcgcaattttgtagcatttctccagcactctggagaaataggcaagacattggcagaaatgagcattgagagccagggcgctggcgatcacaatgaaaaacatcaggcagatcgttctctgccctcatattggcccagcaaagggagcaagtaatgaacaactttaatctgcacaccccaacccgcattctgtttggtaaaggcgcaatcgctggtttacgcgaacaaattcctcacgatgctcgcgtattgattacctacggcggcggcagcgtgaaaaaaaccggcgttctcgatcaagttctggatgccctgaaaggcatggacgtgctggaatttggcggtattgagccaaacccggcttatgaaacgctgatgaacgccgtgaaactggttcgcgaacagaaagtgactttcctgctggcggttggcggcggttctgtactggacggcaccaaatttatcgccgcagcggctaactatccggaaaatatcgatccgtggcacattctgcaaacgggcggtaaagagattaaaagcgccatcccgatgggctgtgtgctgacgctgccagcaaccggtagtgaatccaacgcaggcgcggtgatctcccgtaaaaccacaggcgacaagcaggcgttccattctgcccatgttcagccggtatttgccgtgctcgatccggtttatacctacaccctgccgccgcgtcaggtggctaacggcgtagtggacgcctttgtacacaccgtggaacagtatgttaccaaaccggttgatgccaaaattcaggaccgtttcgcagaaggcattttgctgacgctaatcgaagatggtccgaaagccctgaaagagccagaaaactacgatgtgcgcgccaacgtcatgtgggcggcgactcaggcgctgaacggtttgattggcgctggcgtaccgcaggactgggcaacgcatatgctgggccacgaactgactgcgatgcacggtctggatcacgcgcaaacactggctatcgtcctgcctgcactgtggaatgaaaaacgcgataccaagcgcgctaagctgctgcaatatgctgaacgcgtctggaacatcactgaaggttccgatgatgagcgtattgacgccgcgattgccgcaacccgcaatttctttgagcaattaggcgtgccgacccacctctccgactacggtctggacggcagctccatcccggctttgctgaaaaaactggaagagcacggcatgacccaactgggcgaaaatcatgacattacgttggatgtcagccgccgtatatacgaagccgcccgctaagctttttacgcctcaaactttcgttttcgggcatttcgtccagacttaagttcacaacacctcaccggagcctgctccggtgagttcatataaaggaggaacgtatggctaatccaaccgttattaagctacaggatggcaatgtcatgccccagctgggactgggcgtctggcaagcaagtaatgaggaagtaatcaccgccattcaaaaagcgttagaagtgggttatcgcagcattgataccgccgcggcctacaagaacgaagaaggtgtcggcaaagccctgaaaaatgccagtgtcaacagagaagaactgttcatcaccactaagctgtggaacgacgaccacaagcgcccccgcgaagccctgctcgacagcctgaaaaaactccagcttgattatatcgacctctacttaatgcactggcccgttcccgctatcgaccattatgtcgaagcatggaaaggcatgatcgaattgcaaaaagagggattaatcaaaagcatcggcgtgtgcaacttccagatccatcacctgcaacgcctgattgatgaaactggcgtgacgcctgtgataaaccagatcgaacttcatccgctgatgcaacaacgccagctacacgcctggaacgcgacacacaaaatccagaccgaatcctggagcccattagcgcaaggagggaaaggcgttttcgatcagaaagtcattcgcgatctggcagataaatacggcaaaaccccggcgcagattgttatccgctggcatctggatagcggcctggtggtgatcccgaaaagcgtcacacctagtcgtattgccgaaaactttgatgtctgggatttccgtctcgacaaagacgaactcggcgaaattgcaaaactcgatcagggcaagcgtctcggtcccgatcctgaccagttcggcggctaacatgcaaattctcccggtggcggtaatgttccgctaccggacttttcagaaatcatttattcccctcgcgtcccgcccgttgttactcttccttgttcaggaatgccaaatataaggacatcatcatgcagagccggaagctcttaaaagaacaactcatctatatccgggataaacgcaacggagaggtgaaaaacagatgaaaataatacttctgtttttagcagccctggcaagttttaccgtacacgcacagccccccagtcagaccgtagaacaaacagtccggcatatttatcagaactataaaagtgatgccactgccccttattttggtgaaaccggagagcgggcgataacttctgcgcgtattcaacaggcgcttaccctgaacgacaatcttacgctgccgggcaatattggctggctggattatgatccggtttgtgattgtcaggattttggcgatctggtgctagaaagcgttgcgataacccaaactgacgccgatcatgccgatgccgttgtgcgctttcgtatctttaaagatgataaagaaaagaccacgcagacactgaaaatggtggcggaaaatggtcgttgggtcattgacgatattgtcagcaatcatggcagcgtcttacaagcagttaatagcgagaatgaaaaaacgctggccgctttagctagcttgcaaaaagaacagccggaagcctttgttgccgaactctttgaacatattgctgattatagctggccgtggacgtgggtggtttccgactcttaccgccaggcggttaatgccttctataaaaccaccttcaagacggccaataatcccgatgaagatatgcaaatagaacggcaatttatttacgacaatccgatctgttttggcgaagagagcctatttagtcgcgttgatgaaattcgagtcctggagaaaaccgccgattccgcccgcattcatgttcgttttacgctgaccaatggcaacaacgaagagcaagaactggttttacagcggcgcgaaggcaagtgggaaatcgctgattttatccgcccgaacagcggcagcctacttaagcagattgaggcaaaaactgccgccagattaaagcaatgagctgaattaaataacaattagccggaacaataaataaaagggaacactatatgaaaacgattttcaccgtgggagctgttgttctggcaacctgcttgctcagtggctgcgtcaatgagcaaaaggtcaatcagctggcgagcaatgtgcaaacattaaatgccaaaatcgcccggcttgagcaggatatgaaagcactacgcccacaaatctatgctgccaaatccgaagctaacagagccaatacgcgtcttgatgctcaggactattttgattgcctgcgctgcttgcgtatgtacgcagaatgataaaaaaatccccggtagcgtgtcagttgccggggatattttttaacgtccaaccgccgctttaggccgtttcttcgcaccagcattcaccggacgagattgcgtagagctcgctttttttgccgtagcaggcgtctgacgctgggtcgccatcggcgtatgtttcgtcaacgccggacgggtattgcggttctggcgacgagcttcacgcatctcttcaatggttggcgcaggcactaagcaatcgcgacggctgccaatcagatgctttttgcccatcgcttccagcgcctggcggattaacggccagtttgccggatcgtggtaacgcaacaacgctttatgcaaacgacgctgtttgtcgcccttcggtacgaagacgtcttcgctcttataaccaatcttcgccagcgggtttttcccggtgtaatacatggtggtactgttcgccagcgggctcggatagaagttctgcacctggtcgaggcggaagcggtgctttttcagccacagcgccagattcaccatatcttcatcacgcgtaccggggtgcgcggagatgaaataggggatcagatactgctctttacctgcctgtttactgtaagtatcgaacagctctttaaagcggtcatagctgcccatgcccggcttcatcatcttgcttaacggcccttcttcggtatgttccggggcaatcttcagataaccgccgacgtgatgggtcgccagttctttgatatagcgcggatcttctacggctatgtcataacgcacaccagaggcaatcaggatctttttaatgcctttcagatcacgcgcacggcgatagaggttgatcgttggttcgtggttcgtgtccatgtgcggacaaatatccggataaacgcagctcaaacggcgacaagtttgttcagcgcgtgggcttttgcagcgcaacatatacatgttggcagttggcccaccaagatcggaaatcacgcccgtaaaacctggaacggtgtcgcggatcgcttcgatctcattaatgatgctatcttcggaacggctctgaataatgcgcccttcgtgctcggtgatagaacagaaagagcagccgccaaagcagccacgcataatgttgacgctaaaacggatcatttcgtaagccggaatacgggcattgccataggccggatgtggcacgcgcttgtatggcagcgcaaaaacgctgtccatctcttcggtagaaagcggaatagcaggcgggttgatccacacatagcggtcgccgtgtttttgcatcaatgcgcgggcacagcctgggttggtttcgtggtgcagaatacggctagcatgggcgtacagcactttatcgcccttcactttctcgaaagaaggcagcaacacgtaggttttttcccacggtttcgggcgcggtggctgcacggttacggctttggcttcctgctttttcggtgccaccggtttgttatccgcgcacggcaaatcttcaccatacggatgcgggattgggtcgatttttccaggggtatcaagacgggtggaatccacgccgctccagccaggcagcgcctctttcacgataatcgcggtattacgcacatcgcggatttcactaattggctcgcccatcgccagacgatgcgccacttccaccagcggacgctcaccgttaccaaacatcagcatgtcggctttgctatccaccagcacggaacggcgcacggtatcggaccagtaatcataatgcgcggtacggcgcagactagcctcaataccgccgaggatcaccggtacatctttccacgcctctttacaacgctgggtataaaccagtgtggcgcgatccgggcgcttacccgcgacgttatccggcgtgtaggcatcgtcatgacgtaaacggcgatcggcggtataacggttgatcatgctatccatgttgccagcagtaacaccgaaaaacagattcggtttacccagacgcataaagtcgtctttgctgctccagtccggctgggcgatgatcccgacgcgaaagccctgcgcttccagcatacgaccgcaaatcgccatcccgaagcttgggtgatcgacatacgcgtcgccagtaaccaaaatgatgtcgcagctatcccagccaagttgatccatctcttcacgagacatcggcaaaaacggtgccggtccaaaacaggcggcccagtactgcggccaggagaacaggtcgcgatccggttggatcagggagatagagctcattttgcttccagaaatgataaaaaaataatcaaaggccggggattataagccggaacgaaagagaaatcgaaaggtattccatactcgccctcctcgggcgagtatgaagattacggtaccggattgaccaacagttgcccaatgctgccacggtccgccatttccagcgtctgactgttgaagtagaacgggaagtgcgcccaggaaggctgaccgaaataaacaagcagctccacttgtccgtcaacccaaacggtatctttccagcctctgtcttccgggaacggcatcgcgccattcacgttacggatctggaacattacgccttcaatatggaacgcttgcggctcgtccgcgcgtaccgtccagcgttcccacgttccttgctgcgcggtgacatcaatacggttgacgtcccacagctgtccattaatacccgggtcatcacccagactgatatcgcgactgcgaattgggctaccagccatgatttcagttggcagcaagcgcatcggaagactgtctgtgaccagcggcagaaggccggttgggcgcagcgttagcaccagggtagaaaccagaatactggatggctcaaagaagccacgaatacgatcaacaatgctcgccgcttcgccacaggtgatgctcacttcatcgccgttgctcatatccaccagaatctcgcggcgctcgcccggtgccaggctaagttgcttcacgcttacaggagcaggcaggaatccctgatcgccagaaatcacatgtaacgggcgaccatcgttcatctgtagttgatagcgacgagagttgctcgcgttcagcagtcgcaagcgcacccagccacggctgacttcaacgtacgggctttgtacaccgttaaccagcagcgtatcaccaacaaagccgccgcttcccggttcgttgtattctggcgtaccaaagttatccagccgtttatcctggataatgaccggaaaatcatccacaccataatggttggggataggcaggctcttgctgacttcatcttccaccagccacattccggcaaggccgttatagacctgctgagccgtgcggttgggagtattggcgtgataccacagagtagctgcgttctggcgaatgggcagtacgggtgcccagtcagcgtttgggctcatcatccgtgccggaccgcccatcagcgggcctggtacctgtagcccggccaccgtcatactgacattttctgtcaggcggttgctgtaaataagcttaacatcgtcgcccttccagacgcggatagtcggccccaggtaacgaccattgattccccagacgctcgcgcgtgtccctggcgtaaaactccagtgcgcacgttgtacagtcataaacagcggttgcccacggcgagattcaagtagcggcggaacgggtagcggttgctgttgcccggctgcgctggccttcaggggaacagcgcctgcacaaagtgcaatcccgcttgcctgaatgaactgacgccgactgagactcatatttgctccatgtaaaactggctaaagtaataccgtgcaggaaagtgttccccgcaaaaatacagattgccgacttaaacttttccggcggcttcgcgttctgcgacttctttatcgagctcggcgattttttgttccattatgctacgacaatgggcagccagctcacgaacctgatctttgccatactgactgacgtcaattggcggcagcatttcgacaatcaccagaccgttgtgcagtcgattaagattaatcttattgctagttgtagagacgcacacgggaataatcgggacgcccgccgcaattgccgcgtgaaatgctccagtcttgaacggtagcaggccgcgaccacggctgcgggttccttccgggaacatccagatggaaatacggcgttttttgaagtgattcactacttccgcaatggtgccgtgagctttagtgcgattgtttctgtcgatcaataagttgccggttaaccagtacaactgcccgaagaaggggatccacagcaagctctttttacctaccgtcaccgtcggcggttgcacgatgttgcttgctgtcaccatgtcatagttgttctggtggttagcgatatagatagcattgccgtagctttcagcgtctgtaggtttacggcactcaactttcaggccaaacagcggcgcaagacggccaaacatatgcccaaaggtggccacatgtttcgggttacgcgggctgaaaaggcagtaaatggagccgaatacacagactaagatgctgtaaatcacggtaataataagacgaaagatatatagcataacaccctctgaaggtctgagagactggcattgtacgtcacctgaaatcaggttagggcattgttaaaagccgctctctggaaaagcgtattgttaatcgcaacgcatgaataaacaacggtttcaagggaatttttatcgtttccgggggttgaatacgctgccggatgacgacttaacgtttcatccggcgttccttgcaagcgggaggaaacagcgccctccccggcatattactcttcgctatcaccgctgctggcacggcgaggagagtcgatctcaacacgatcgatacgctgcaaaccgcgcatcaacgtaccgcggcgtccacgttcgccagtgactttctgtaactcttccgggcgcagtttaattttgcgtttcccaacatgaatggtcagcgtgctttgcggcggcagaacgtacaattgcgccagaccatcttctccacgcgcggcttctgcgcttggaatgttgataatcttgttgcctttgcccttgctcagctgcggcagatcacttaccgggaacatcaacatacggcctgcctgagtgattgccagcagcatatcggaagcatcttcaatcaccaccggcggcataacatgggcattttccggtaaggtgatcaaagccttacctgcacggttacgcgccaccagatcgttaaaggtgcagacgaaaccgtaacccgcatcggaagccatcagcagtttctgatcgtcgctttccatcagcatatggtcaacggtcgccccaggcggcaacgttaatttgccggtgagcggctcgccctgaccacgcgcgctcggcagcgtaatcgggtcaatggcatagctacgaccggtggaatcaacaaacactaccggttggttgctcttacctttcaccgccgctttgaagctatcacccgctttataattcaggcccggcgcgtcgatatcatggcctttagcgctgcgtacccagcccatctggctcagcacaatggtgacaggttcagacggcagcatgtcgtgctcgctcatcgctttcgcttcttcgcgttcctgcaacgggctacgacgatcgtcaccgtaggcttgcgcgtctgcctgcagttctttcttcagcaggttattcattttacgctcggaagccaaaatgccctgcaactggtcgcgctctttttccagttcactctgctcaccgcgaatcttcatctcttccagtttggcaagatgacgcagtttcagttcgaggatcgcttccgcctgggtttccgtaaggccaaaccggctcatcagcgccggtttcggttcatcttcattacgaatgatctcaatcacttcgtcgatattgagaaacgccaccagcaaaccttcgaggatatgcaggcgcttgaggactttctccagacgatagttcagtcggcggcgcacggtatcgcggcggaacaccagccattcggagaggatttccagcaggtttttcaccgccggacgaccatccagaccgatcatattaaggttaatacgatagctcttttccagatcggtggtagcgaagaggtggttcatcacctgatccatatccacgcggttggaacgcggcacaatcaccaggcgggtcgggttctcgtggtcagattcatcgcgcagatcgtcaaccatcggcagctttttgttgcgcatttgcgcagcaatttgctccagtacgcgcgcaccactaacctgatgcggcaatgcgctgataaccaccgcgccatcttctttcttccacaccgcgcgcatacgcacactaccacgtccgttctcgtagattttacggatctcggcgcggctagtgataatttccgcttcagtcggataatccggcccctgcacgatatccagcagctgatcgagcgtggttttcggctggtcgattaatgcgattgccgcctgagccacttcacgcaggttatgcggtggaatatcggtcgccatgccgacggcaataccggtggtgccgttaagcaaaatgtttggcagacgggcaggtagcattttcggctcctgcaaagtgccgtcgaagtttggcacccagtcagccgtcccctgccccagctcgctcaatagcagctcggaatatttgctcaaccgggattcggtgtaacgcattgccgcgaagcttttcggatcgtccggcgcgccccagttcccctgaccatcaaccagcggataacggtaagagaacggttgcgccatcaggaccatcgcttcataacaggcgctatcgccgtgcggatggtatttacccagtacgtcaccgacggtacgggcgctttttttaaatttggcgctggcattcaggcccagttcagacatcgcatacacaatgcggcgctgaacaggtttcagaccatcaccaataaacggcaacgcacggtccatgatcacgtacatggagtagtttaagtaggcgttttccgtaaattcatgtagcgcaaggcgctctgccatatcgctcattaattctgattcctcaacttattcgccagccttcaaaggggcaatattgccggagatactacattatctgccgcgtcgagtcacaggagatcaacgtgaatagcgccgccggacgtgctccgacggcgataaaggcatcaatgtgccttgatatacaactctttgctgtagacataatcctggggattatgcagcggaaaaccgccaacgtagggtttaagcagtttgattaacggctgatagtagataggaatcagcggtgcctgttggttgatgatcacttctgcctgctgatacaacgcattacgctttgtcgcatcagtgatctgcgtggcctggtttagtaaggcgtcatactgcgcatttttccagtgaccgacgttttcttcactatcgcttttgagcgtgttcaggaagctggaagcatcattgtacgtcgcatcccagctctgccgagacagcatgaaatcaccggctcgtcgggcatcaagataggttttccactccattgtgcgcagcgtcacctgtgcacccagccattttttccattcggaagacaacgctatcgcggtcttttcatgcagatcgtacttgttgtagaacagctcaaagcgtagcggatgagaggcgtcgtatcccgcctgtttcagcaaggcttttgccatcgcgacgcgctcactcattggcttttgcagttcatcgaacgtcgtcgcgctaaagccttttacctctggcggcgtcagcgtggttgcgggcgttctcaaccccagtaccttttgcgcaataagctgtcgatcaaccgtaagatatagcgcccgacgcactcgcacatcgttaaatggcggtttctcaaggttgaagttgtaatattcgctgttcagacgcggaataattcgtagctcgccaggcagacttttttcaatggcgggaatttgctgcgccggaacccaggtgagatcgacctctcccgcgcgatagcggttatagccggtgacgctattatctagcgccagatactcaacctgttgcaatactgtatgttgcgcatcgcggtactttggatttttgcgtgcagtaatcttttcgttaactacccactgatcaagcacaaaggcaccgttgtaaaccatgttctctggcttactccagctatcgccatgtttagcgatgacatgatgaggaaccgggaacagcgtcggccaggcgagcatcgtcgtgaaccaaggaaccggctgctcaagcgtaacttcaagagtacgatcatccgtcgctttgacacccaggcttgtaacatctgctttacccgcaacaatagctgcggcattgttaatgtgcgcctgtgccagatagccagcaaaagggcttgccgttttcgggtcaaccgcgcgctgccagccgaggacaaaatcctctgccgtcagaggctgaccgtcggaccactgcaaaccgctacgcagatggaaaatatagcgcttgccgccgtccagtatctcccagcgttcagcctgagcgggctgcacctggccttcaccgtccatccataccagaccttcaaacagatccagcacaatctgcgcggcagtattctcctccaccttttgcgggtcgagcgtacctgggtcgctatgattgttgtaacgaaagacttgttgcggggcgagcggtgtgttggcgggaacgtcagcagcgtagagaggagccgcacttaccaggctgaccagccataataaatttcgcgtatacatggtattccttaccggagaaattataagcccaacaacaatacgcctgtggcattgttcgctcaaacttatcgcgagtgatttggctcacactccggtaaagaaaaaagcgagttgcccccgcttttccattaattaacggatttcattcaatagttctggatgcttatccagaacacgtaaaagtttgattgtggaaggatgaggttgggcattgcctttttcgtaacggctaaacgcatttacacctcccccaaaaatttcgcttgcctctttttgggtaagagagagcttttttcgaaccttcactataaattcaggtgccactgtttcggcattcacgctagcccgaaatgcctttacttgcgccatgaaagcatcactctcttctttattcatgatgctctcttcgcaatggacacaatataaaccgtggatacctttcaatactgtttttcgtccacggaaggtgtatggaatatctttaatgccagaaaccatttctccctggtggcaaaccggacatttcatattacttctccttaaagctgacgatcagtacgtcatgaattaccgtaattttaagataaacctggcctgtaacaagcctgggtctgtaaacatcctgccagatagtatgatcagagtaggtggtcatgcttttataaaagtcgctctcacttaatccaatgataacattacacataccatcaaaatccaaacctaactcatctgcatttaacagggcactacgtgttgtacgaacttgcccggcattgacaagttttttaacctgactcaaacgtgtatgtggtgtgcgtttttccataacccccgcctccctgttactttagttataacctaaaaggttaattacagcaatgaaaaagcacctaaaaggttagttagatgtacggagatagtgaccacacaaaacgtattctttaaggaaagtgattgaccatataagaaagtggcgcattagtagcgccagtttgaagcaggaatttataagggaagctggagtcaggcatcacgccaacggcacataaacatccgtttccagtcgctgctctgtcaccccttcggcaagattggtgtagtgaaacagaatcggtgctttacgcattttctcgccgcttgcaggcagccagtggcgaatgatgccccataccgtgtgactaatatcgtccagctcgccaacgtggcgggccacggcataacgtccaccggtaagttcaccattgctcacaccataacgattatcgggaatcggttcgctaacgctgccgcagatatcaaagcgaaacgcttccggtgcggtggtggcagggtcgtcccaggcgacgccaaaagtctggctttggttaacaggagaaagccccgtctctttacgccacatgataaatttcgccacgctgtagttgagcaattcagggctacagcggtgcggcaacatcgccacaggtatacttgggaaatcgataatgtttacatccagtgtcaggtttgtcattttgcctccctgcgaaattattcccgggaacgcgtcccgggagcggtaacaattacggatttactttgcggatctgtttgacgtcaatttcaacagaattccagtctttatcgacttcaccctgaatctcaaccgtatctttcggcgtcaccgtcacgccgttccagcgtttgtggtcgatatcaacattgatagtaccgctggcatctttgaacacgtagagatcgtcagagatgcgttcaacgatattgccgcgcagggttacccaggtgtcgtcacgcagggattttgcgctttctacagtcgttacgctgccgttcggcccctggaatcctccggcctgactttgcgttgcgcttgggccagaaaaaccgccctgctctgctgccatcaccggtgcgctgcacagggccattactgcgattactgctgcgaattttttcatgtttattactccctttaatgtctgtttccgagcatttaacaagatagtccttaacaacttcttaagggaaaaaaataaaatttagtgctgtacagagcgcgttacaacacggtttactggcagcaaatacggttatcgcagggatgaaaaaatgcgaattttactgatagaagatgacatgctgattggcgacggcatcaaaacgggccttagtaaaatgggttttagcgtcgactggtttacacaaggtcgtcagggaaaagaggcgctttatagcgcaccttatgatgcggtgatcctggatttaaccttaccaggcatggatggtcgcgatattttgcgcgaatggcgagaaaaaggtcagcgtgagccggtactgatcctgaccgcgcgcgatgcgctggcggaacgtgtagaagggctgcgtctgggagctgacgattatctgtgtaaaccttttgcgttgatagaagtcgccgccaggctggaagctctgatgcgccgaaccaacggccaggccagcaacgagctgcgccacggtaacgtcatgctcgaccccggcaaacgtatcgccacgctggctggcgaacccttaacactgaaaccaaaagaatttgccctgctggaattactgatgcgtaacgctggtcgggtactgagccgcaaactgattgaagagaaactgtatacctgggacgaagaggtcaccagtaatgccgttgaagtgcatgtgcatcatctgcgacgcaaactcggtagtgattttattcgtaccgtgcatggtattggttacacattaggtgagaaatgaaatttacccaacgtcttagtctgcgcgtcaggctgacgctaatctttttaattctggccagcgtgacctggctgctttccagctttgtcgcctggaaacaaacaacggataacgtcgatgaattgttcgacacccaactgatgctgtttgccaagcggttaagtacgctcgatctcaacgaaatcaacgcggcggatcgcatggcacagacgccaaatagattaaaacacggtcatgttgatgacgatgcgctgacctttgccatctttacccacgacggcagaatggtccttaatgatggcgataacggagaagatattccctatagctatcaacgggaaggttttgctgacgggcaactggtcggtgaagacgatccttggcgttttgtctggatgaccagtcctgatggcaaatatcgcatcgttgttggccaggaatgggaataccgtgaagacatggcgctggcgattgttgccgggcaattgatcccgtggctggtcgcactgccgattatgttaatcatcatgatggtactactgggtcgtgaactcgcgccgctgaacaaactggcgctggcactacgtatgcgtgaccctgacagcgaaaaaccactaaacgcgactggcgtacccagcgaagtgcggccactggttgagagcctaaatcaactgttcgcccgcacacatgcgatgatggttcgtgaacgacgctttacctccgacgcagctcacgaacttcgtagcccgttaacggcgctgaaagtgcaaaccgaagttgcgcagctctctgacgatgatccgcaggcgcggaaaaaagcactgctccaattacattccgggatcgatcgcgctactcgtctggttgatcaactgctcacgctaagccggctggacagtctggataaccttcaggacgtcgcggagatcccgcttgaagatctcctgcaaagcagcgtgatggatatttaccacacggcgcagcaggcgaaaattgacgtgcgactgacactcaatgcccacagcatcaaacgcaccgggcaaccgctattgctaagtttgttggtgcgaaatttgctggataacgccgtgcgctacagtccacagggcagcgtggtagacgtcacgctgaatgctgataatttcatcgtgagggataacggccccggtgtgacaccagaggcactggcgcgaattggcgaacgcttctatcgcccacccggacaaaccgctaccggcagcgggcttgggctaagcattgtccagcgaatcgccaaattgcatggcatgaatgttgaatttgggaatgcggaacaaggtggatttgaggcgaaggtaagctggtaacttctctgtctatgagagccgttaaaacgactctcatagattttattaatagcaaaatataaaccgtccccaaaaaagccaccaaccacaaaccagacaaataccgaggctgaatacatatacccaaaactcgaacatttcccgcataaagagttttcttaagataagaataataagtggcgtaagaagaaaaaatgctgcaatcattgcttgcaatatacgatcttcgccactaacggaaggtatactgcaaatatttcctccgctctcaagcatccagtcatacttattgaaagcaaaaaaagaatctattaaccaataagtaagcattatatatagcaatgcttcaaatattgttttaattttctgctttaacatatatcagtacgctcataaaaatccatttataattatcaacatgacacgttgatactttcatcttttacttattcaaagccatattttcaatccccaaaaaaaccgaaccaaacgtgtaaattattccggtgcgagtaagaattatgaggaatggctatcagtattgtcattttcagaaaatatttatcctgcatcggtgagtcagagtaagatcagacttttgctaaattcgcaaaagactttgcacattttgctaatttcaccgtaccgctctgtgacgtactatagtcggcaaacgtctcaccttgaggttaaaaaatgagcaacatcctgattatcaacggcgcgaaaaaattcgcccactccaatggtcaactgaacgacaccctgaccgaagtcgcggatggcacactgcgcgaccttgggcatgatgtccgcatcgttcgcgccgacagcgactacgatgtcaaagcggaagtacaaaactttctctgggctgatgtggtgatctggcagatgccaggctggtggatgggcgcgccgtggacagtgaaaaaatacattgatgatgtattcaccgaaggtcacgggacgctgtatgccagcgatggtcgtacccgcaaagatccgagcaaaaaatacggttccggcggcctggtacagggcaaaaaatatatgctttctctgacctggaacgcaccaatggaagccttcaccgaaaaagatcagttcttccacggcgttggcgttgacggtgtgtatctgccgttccataaagcaaaccaattcctcggtatggaaccgctgccgacatttatcgctaatgacgtgataaaaatgcctgatgttccccgctatactgaagaatatcgcaagcatcttgtggaaatttttggttaactagagctcaggctttagaaggagttaaccatgcttaccgtaatcgcagaaatccgtactcgtcctggtcaacatcaccgtcaggcggtattggatcagtttgctaaaatcgttccaaccgtactgaaagaagaaggttgccacggctatgcgccaatggtggattgcgcagctggcgtgagtttccagtctatggcaccggattctatcgtgatgattgagcagtgggaaagcatcgcgcatcttgaagcgcatctgcaaaccccgcacatgaaggcgtatagcgaagccgtaaaaggtgacgtgctggagatgaatatccgtattctgcagccagggatttaatcctgccttgtttgcccggccatcctgaccgggcaatgttctttcctttaaacctcaatctccgccatgtcgcctttctcttgcaaccagttgcggcgatcttcgctgcgtttcttcgccagcagcatatccatcatcgcgtcagtacgctgatcgtcttcatcatcgatagtcaactgcaccagacggcgagtgttcggatcaagcgtggtttcgcgcaattgcatcgggttcatttcccccagacctttaaaacgctggacgttcggcttgcctttcttgcgttttaattgctcaagtacgccctctttctcttcttccgtcagcgcgtaataaacctctttcccgagatcaatacggtagagcggtggcagtgcgacgtaaacgtgaccgtgtttcaccaacgcgcggaaatgttttacgaacaaagcgcagagcagcgtggcaatgtgcagaccatcagagtccgcatccgcgaggatacagattttgccataacgaagctggctcagatcgtcgctgtcaggatcgataccgatcgctacgctaatatcgtgcacttcctggctagccagcacttcgtcggaagagacttcccaggtgttaaggatcttacctttcagtggcatgatcgcctgatattcgcgatcgcgcgcctgcttggcagatccgcctgcggagtcaccttccacaaggaacagctcggtacggttaaggtcctgcgcggtacaatcagccagtttgccaggcaacgccgggccgctggtcagctttttacgcaccacttttttggccgcacgcatacggcgctgggcgctggaaatcgccatctccgccagcagttcagccgcctgaacgttctggttcagccacaggataaaggcatctttcaccacgccagaaacgaatgccgcgcattgacggctagagagacgctctttcgtctgcccggcaaactgcggatcctgcatttttacactcagcacataggcgcagcgatcccagatatcttccgcgctcagctttacaccgcgcggcagaatattgcggtattcacagaactcacgcatcgcgtccaacaggccctgacgcagaccattaacatgggtaccgccctgcatcgttgggataaggttgacgtagctttcggtcagcagttcaccgccttccggcagccacagtagcgcccagtccacagcttcagtatcaccagcgaaattaccgataaacggtttttccggcagcgtcggcagaccatttaccgcttccgccaggtaatcattcagaccgtcctgatagcaccagcgttgttcggtattgttgatctcatctttaaaagtgatctcaacgccagggcacaataccgctttggctttcagcacatgcgtcaggcgactaacagaaaatcgcgggctgtcaaagaaggtttcatccggccagaagtgcacactggtaccagtattgcgtttaccgcaagtgccgacaacctgtaaatcctgcaccttttcgccattttcaaaggcgatgttataaacctgaccatcgcggcgcacgttaacttctacgcgcttgctcagggcgttaaccacgctaatccccacgccatgcaggccgccagagaactggtaatttttgttagagaatttaccgcctgcatgcagacggcaaagaatcagttcaaccgccggtacaccctcttccgggtgaatatccaccggcatcccgcgcccatcgtcaataacttctaagctctggtcagcatgtaaaataacgtccacgcgttttgcgtgacccgccagtgcttcatccacactgttatcaatgacttcttgccccaaatggttagggcgagtggtatcggtatacatccccggacggcggcgaaccggctcaagcccggtgagtacctcaatggcatcagcgttataagtttgcgtcatggtttaagttagtaattcgagttgatcgtcagagatggtgcagaccaagaaaatcgacgatcgggttgaaataatcttcgaagcccgtgaatgcgtggttgccgccttctatgacagtctggcggcaggaagcgtagtacgccaccgcctggcggtaatccagcacttcatctcccgtctgttgcagcagccagatcaaatccggcgcttccagcgggtcaatctgcatgactttaagatcgtaaatatggcgactctctagcacatattgctgcccggtgtaggggttctcgttctgaccgagatagtccgtcagcagttcaaacgggcgcaccgccgggtttaccaccactgcgggcagcataaaacattgactcaaccaggtggcgtaatatccccccagactgctaccgacaatacccaggctatcaccgccatgttccaggacaatggattccagcagctctgccgcgtcggaaggatacggcggcaactgcggaatgatcatctcaacgtcagggtgatgttccgccagccagttttttaacaagctcgcttttgcagagcgcgggctgctgttgaaaccgtgtaaataaagaagcgtagacatcagtagccttcactagcggtatcaggttggaaacgtgtgtccgccaggcgatgcacctcggtggtcagcgtgccatcagcatgtaactcgagagtacgccagccgggcgcgatggtatccagcgtaaagttggaacagtgcggcttaaactgcacacaggtgctcggcgttgccagcaggcggcgaccattccagtcgagatccagctcctgatgaatatgaccgcacagcaagtatttgacgtgcggaaacttcgccagcacggtatccagttcgcccgcgttacgcagactgtgttgatcgagccaactacaacccgcaggtagcggatgatgatgcagcagcagcaacgtatggcgttctggcgcatcggccagtttacgttccagccactcaagctgaaactcgctcagctcaccgtgcggcacgccaaacacctggctatccagcaacaggatttgccattgctcaccaataaacacgcgcttcgccggggagatacccgcatcctgtaacgcgctgtacatcgcgggctggaaatcgtggttgcccggcagccagacgcagggcgcacgaaaacttgcgatgccttcagcgaaatgctgataggccgcagaggattgatcctgcgctaaatcacctgtcgcgacaatcaggtcgaattcgtgctggtgtggccgaatcgcctccagcaccgcctggtaactctcccaggtgtttacccctaacagggcttcgtgcttttgtgcaaacaggtgagtgtcggtaatttgtaaaatcctgactctggcctcaccagccagaggaagggttaacaggctttccaaatggtgtccttaggtttcacgacgttaataaaccggaatcgccatcgctccatgtgctaaacagtatcgcaaccagtccgctaaaaactgattaatttgatgcttttcgtcgcgttgatgcaactttttattaggataatcataccgcgctttgaagcgaaaaatctgctggctactacacacttcagccaccatcgcgtcatgatacagacgcaccgtcatactcggaaggctccagtaactgatcgcgggcgcagtctgttctattgtcaccagggtagtgtatcgggtgctttccacaatcgtcagccgatattgtgcgtttgccacctgatagcttacagtttcgccgggtgcgtcattgcgcggtaacaaacggcgcaattgactaaagttcatctcgcacaggcgcatcatttcaggaaagtcaggtgtgtaacgcttcatttatgcccactcattttttaacgcttgatgatgcagctgcagccattgcaaagcgatgacgctcgctgcgttgtcgattttcccctcttctacccactggtatgcctgttcccggcttaccacatgaacgcgaatatcttcgttttcatcagccagaccgtgaataccgcttgcggtcgtggcgtccacttcgcccaccataatactgctacgctcactggtgccccccgggcttgccaggaaacttaacaccggtttggtccgtttgactatcagtcccgcctcttcaatcgcttcgcgacgggcaacatcttccacactttcaccctcttcaatcatcccggcaaccatctccagtagccaaggggtttcgctggtgtcgtacgcggcaatccgaatctgctcaatcagcacaacttcatcacgcactgggtcaaagggtagcaagactgcggcgtgaccgcgctcaaaaatttcccgccgcacctcatgactcatttgcccgttgaatagacgatgacgaaatctataaagatctaaactaaaaaagccgcgataaagtgtttctcgtgcaataatttctacatcgtttttgccaaatgtaacgggcaggttgtctggcttaagcattgttaatgtcctggcactaatagtgaattaaatgtgaatttcagcgacgtttgactgccgtttgagcagtcatgtgttaaattgaggcacattaacgccctatggcacgtaacgccaaccttttgcggtagcggcttctgctagaatccgcaataattttacagtttgatcgcgctaaatactgcttcaccacaaggaatgcaaatgaagaaattgctccccattcttatcggcctgagcctttctgggttcagtagcttgagccaggccgagaacctgatgcaagtttatcagcaagcacgccttagtaacccggaattgcgtaagtctgccgccgatcgtgatgctgcctttgaaaaaattaatgaagcgcgcagtccattactgccacagctaggtttaggtgcagattacacctatagcaacggctaccgcgacgcgaacggcatcaactctaacgcgaccagtgcgtccttgcagttaactcaatccatttttgatatgagcaaatggcgtgcgttaacgctgcaggaaaaagcagcagggattcaggacgtcacgtatcagaccgatcagcaaaccttgatcctcaacaccgcgaccgcttatttcaacgtgttgaatgctattgacgttctttcctatacacaggcacaaaaagaagcgatctaccgtcaattagatcaaaccacccaacgttttaacgtgggcctggtagcgatcaccgacgtgcagaacgcccgcgcacagtacgataccgtgctggcgaacgaagtgaccgcacgtaataaccttgataacgcggtagagcagctgcgccagatcaccggtaactactatccggaactggctgcgctgaatgtcgaaaactttaaaaccgacaaaccacagccggttaacgcgctgctgaaagaagccgaaaaacgcaacctgagcctgttacaggcacgcttgagccaggacctggcgcgcgagcaaattcgccaggcgcaggatggtcacttaccgactctggatttaacggcttctaccgggatttctgacacctcttatagcggtagcaaaacccgtggtgccgctggtacccagtatgacgatagcaatatgggccagaacaaagttggcctgagcttcagcctgccgatttatcagggcggaatggttaacagccaggtgaaacaggcacagtacaactttgtcggtgccagcgagcaactggaaagtgcccatcgtagcgtcgtgcagaccgtgcgttcctccttcaacaacattaatgcatctatcagtagcattaacgcctacaaacaagccgtagtttccgctcaaagcagtttagacgcgatggaagcgggctacagcgtcggtacgcgtaccattgttgatgtgttggatgcgaccaccacgttgtacaacgccaagcaagagctggcgaatgcgcgttataactacctgattaatcagctgaatattaagagtgctctgggtacgttgaacgagcaggatctgctggcactgaacaatgcgctgagcaaaccggtttccactaatccggaaaacgttgcaccgcaaacgccggaacagaatgctattgctgatggttatgcgcctgatagcccggcaccagtcgttcagcaaacatccgcacgcactaccaccagtaacggtcataaccctttccgtaactgatgacgacgacggggcttcggccccgtctgaacgtaaggcaacgtaaagatacgggttatctgccgcattcttcccccttcagccttcaatttcgaccagccatcctctattctgatgggtatttaccactggtcccggaagacaaaaatgaaacggacaaaatccatacgccacgcatcgttccgcaaaaactggagcgcacgccatctgacaccagtcgctctcgcggttgccactgtttttatgctggctggctgtgaaaagagtgatgaaacagtgtctctctatcaaaatgctgacgactgtagtgctgcaaacccaggcaaaagcgccgaatgtaccaccgcgtacaacaatgcgctgaaagaagccgaacgtactgcgccgaaatacgccacccgtgaagactgtgttgctgaatttggtgaaggtcagtgccagcaggcaccagcccaggctggcatggcaccagaaaaccaggcgcaggcccagcaatccagcgggagtttctggatgccgctgatggccggttacatgatggggcgtctgatgggcggcggcgcgggatttgcacagcagccgctgttctccagcaaaaacccagccagtccggcttacggtaaatataccgacgcgacgggtaaaaactatggcgcagcccagccaggccgcaccatgaccgtaccgaagacggcaatggcaccaaaaccggcgaccaccactaccgttacccgtggcggttttggtgaatctgttgccaaacaaagcactatgcagcgtagtgcaaccggtacctcttctcgtagtatgggtggctgataccgatggaaagagtcagtattaccgagcgcccggactggcgtgagaaagcccacgaatacggtttcaattttcacaccatgtacggcgagccgtactggtgtgaagatgcttactacaagttgaccctcgcccaggttgaaaagctggaagaagtcaccgccgaactgcaccagatgtgcctgaaagtggtggaaaaagtgatcgccagcgatgagctgatgaccaaattccgcattccaaaacacacctggagttttgtgcgccagagttggctgacgcaccagccaagcctttatagccgtcttgatctggcgtgggatggcactggtgaacctaaacttctggaaaataacgccgatacgccaacgagtctatacgaggcggcgttctttcagtggatctggctggaagatcagcttaacgccggtaacttgccggagggcagcgaccagtttaacagtctgcaagaaaaactgatcgatcgcttcgttgagctgcgtgaacagtatggcttccagttgctgcatctcacctgctgtcgcgacacggtggaagatcgcggaaccattcagtatttgcaggactgcgcaacggaagctgaaattgctactgagttcctctacatcgatgatatcgggttaggtgaaaaaggtcagttcacggatttacaggatcaggtaatttccaacctgttcaaactgtatccgtgggaatttatgttgcgtgagatgttcagtaccaagctggaggatgcaggcgtacgctggctggaaccggcgtggaagagcattatctccaacaaggcacttctaccgctactgtgggagatgttcccgaatcacccgaacctgctgcccgcttattttgcggaagatgatcatccgcaaatggaaaaatatgtggttaaaccgatcttctcccgtgaaggcgcaaacgtgagcatcattgagaacggcaaaaccattgaagcagcggaaggtccgtatggcgaagaagggatgattgttcagcaattccacccgttaccgaaattcggcgacagctatatgctgattggtagctggctggtgaacgatcaacccgccggaattggcattcgtgaagaccgtgcattgatcacccaggatatgtctcggttttatccacatatttttgttgaataagccacgataccggatggcactcgccatccggtaattgttagcctatctgcacgctcagcatactcaggctgcccatttctataccctcaaccggaatggtaattggctcctgcccatcccacgcacctaacacatacaacaacggcaaataatgctctggcgttgggttgcttaacgtgccaccttcatggtcgaggtaattcaccagaggatgttgttccactggcccttgccacgtcagattcgctttcacatactcattaaagctcgtcgcccacggatacggactactatcaccgtgccacttcactgtgcgcaggttatgcaccacgttaccgctggcgaccaacattattccttcatctcgcagcgctgccagtttgcgccccatttcgaaatgccaggcggcaggtttgctactgtcgatactcaactgcaccatcgggatatcagcgtcaggatacatcttaatcagcacgccccagctgccgtggtcaaagccccaggcttctttatccagcgtcaccgggatcggcgctaacagctcaaccagacgctgtgccagcgcagggctacccggagcaggataatgcgtatcgtacagcgcctgcgggaagccaccaaagtcatgaatcgtgggcggcgtctccatcgcggtcactcctgttccacgggtaaaccagtgagcgctaaccaccacaatcgcttgcgggcgtggcaatgtcatccccaacttctgccagctgcgggtatacaaattatcttccagcacgttcatcggactaccgtgacctaaaaacaatgctggcatacgtgtactagacatgatgatatccttaactaaaggtgtcattttgatatcctcacaatacgcttgttcggcggagtaagaacccggataacaatgatgatgatcatcagttattttgacgatctgcctgaaggtgaagatttataaggagttgtcgatgagtgtacctctcattctgaccatactggcgggggcagccacgtttattggcgcgtttctcggcgttctcgggcaaaaacccagcaaccgcttactggcgtttagcctaggttttgcggcggggatcatgttgctcatcagtttaatggaaatgcttcctgccgcactagcagctgaaggaatgagccctgtgttgggttatggaatgtttatcttcggtctgcttggctattttggcctggaccgcatgttgccacatgctcatccgcaggatttaatgcaaaaaagcgtgcagccgttgccaaaaagcatcaagcgcacagccattctgctcactctcggcatcagtctgcataacttcccggaagggattgccacctttgtcacggcgagcagcaacctggagctgggatttggcatcgcactggccgtcgcgttgcacaatatccctgaaggtctggcagtggcaggcccggtttatgcggcaacggggtctaaacgcaccgcgattctgtgggcggggatttctggactagcagaaattcttggtggtgtgctggcgtggttaatcctcggtagcatgatttccccggtggtcatggcggcaatcatggcggcggttgcaggaattatggtggcgctcagcgttgatgaattaatgccgctcgccaaagagattgaccctaataataaccccagctatggcgtactatgtggaatgagtgtgatgggattcagtttagtgctgctacaaacggcgggaattggttaaaaacaacatcagaagttgtccagcgcatggacaacttctgccagcttcacgaaagccttattctaccttttcggctgtctcttctctcgtactgtttaagtatttgttccgcgcttcaagcagtgcgtctctgtcctggcgaaacgcccgacaataacgtttcaaatgcaggaaataacccaccacaaccagagcaatcaatacaatccagtaccaggcgataaacatccttttacccttaatatttaacaatactaaacatttagcgtataaatttcacatatcctttttcggatatattcatatggtcgcataataacggaacaattatatgattttgatcataatgaaaaagaatgcctgatattaatgaaattttctcatagaaagagaagcggaattaacatcttgcatagcagggaaaaataaaaaccgaagcctgctacaacttcggtttcttgattaaggcagtaaattaagcagcggttttcagctggctttacgctcatgtgcctgacggtatgccaccaggtcttcaatagtcacgagcgccatattgtgtttattggcaaactcaatacactctggtgcacgcgccatcgtgccatcgtcattagtcagctcacacagtacaccagccggtttaaagcctgccagcgtcatcagatcaatagttgcttcagtatgaccgccacgcgtcagtacaccacctgcctgagcgcgaagtgggaaaacgtggccaggacgattcagatcactcggttttgcgccatcggcaatcgctgcgcgaacggtcgtaatacggtcagcggcagaaacaccggtagtcacaccttcagctgcttcaatggtcacggtaaaaccggtgccataggcgctggtgttattttctaccatcattggcagatcgagttgtttacggcgatcttcagtaatgcacaggcaaacaataccgctaccgtggcgaatggtcagcgccatctgctcaacagtcatggtttctgccgggaagatcatatcaccttcgttttcacggtcttcatcatcaagcaccattacaccgcgtccttcacgcagcgcagccagtgcattttcaacacgttcgaaaggcgtaccaaaagaggaaagtagcgtctgattcatggtaaaaaaacctcactaaaattatggttaccagaatcagggcagtcttaggagtggcggcatatagccaaaataacgtgagcgggtccatgcccgacagaatcgttactctctcccatccggactctaaccgtcggccccggaattacaccggatctgctgtcctttgagttcgcacccaaagcgctcgcgggctttcaactgagttgatttaccgccggtggggaatttcgccccgccctgagaataagcggattcactataacgctaatgattagcggcagcaacgcatagcttcacataattctggtttatatctaatacaaacactaaaacgggccatcaggcccgttatatcagtgctctaactccagctctcttgcctgcatcatctgttgacaataccaggcataacgtgcgcaaaaccaggttctatgttcttcatccatgttaccagtaacggccagaatatcgaccgggcgaccttctgcgtgcattctggcaaaactacgcgccaggaaatcgaaattatttaaagaattaagactatgatccataagcacatcctccggttatcgcataccttttaaggccatatgctttttctgatttcagtattccccaatcagtgtagtgcctttaaacataacgtgcgtaaatatattgtccccgatcacactttttagtgaaaaataaaaaaccatattaaaagactttctcttccagaacttctctaacctgtgttattattaacacagataaatgtaagcaaggaaactattacaaagtaaatattgcgtcactaaatggacattggagtgatatatgattttattcgccgactataacaccccttatcttttcgctatttcctttgtactgttgatcggcctgttagaaatttttgcgcttatctgcggtcacatgctctccggtgctcttgatgcacatcttgaccattatgattctataaccacaggtcatattagccaggcacttcattatctcaatattggaagattgccagctctcgtcgttctctgcttactggctggtttttttggtcttattggcatcctgttgcagcatgcctgcatcatggtctggcaaagtccactgagcaacctgttcgtggttcctgtcagtttactgtttacgattattgcggtgcattataccggtaaaatagttgcgccctggattccacgcgaccatagtagtgctattacagaagaagaatatattggtagcatggcgttaattaccggtcatcaagccactagtggtaatccctgcgaaggaaaactcaccgatcaatttggccaaatacattatttactactggagcctgaagaaggaaaaattttcactaaaggagacaaagtgttaattatttgccgactttctgcaacgcgatatttggcggaaaataatccctggccccaaatattgtaatttattaatcaaaaggaaatttaataatggatgatattgttaattctgtgccctcctggatgtttaccgcaattattgccgtatgcattctgtttattattggaattattttcgccaggctctatcgtcgcgctagcgcagagcaagcttttgttcgtactggtttaggtgggcaaaaagtggtaatgagcggtggcgcaatcgtgatgccgatctttcatgaaataatccccatcaatatgaatactctgaagctggaagtcagccgcagtaccattgatagcctgattacgaaagatcgtatgcgcgtcgatgtagtagtcgctttctttgtgcgggtaaaacctagtgtagaagggattgccaccgctgcccagacgctggggcaacgcaccctgagccctgaagacttacgtatgttggttgaagataaatttgtcgatgccctccgtgcaacagctgcgcaaatgaccatgcatgagttacaggatacccgcgagaactttgtgcagggggtgcaaaatacagtggcagaagacctgagcaaaaacggtctggaactggagagcgttagtcttaccaactttaaccagaccagcaaagaacatttcaatccgaacaatgcctttgacgccgaaggtttaaccaaactgactcaggaaacagagcgccgtcgccgcgaacgtaacgaagttgaacaggatgtagaagttgcggtgcgtgaaaaaaatcgcgatgcgctaagccgcaagctggagattgaacagcaagaagcgtttatgacgcttgagcaggagcagcaggttaaaacccgtactgccgaacagaatgcacgtattgcggcttttgaagctgaacgtcgtcgtgaagcagagcagacacgaattctggctgaacgacagattcaggaaacagaaatcgaccgcgaacaggccgtccgcagtagaaaggttgaagctgaacgtgaagttcgcattaaagagatcgaacagcagcaggtcaccgaaatcgctaaccagacgaaaagcatcgctattgccgccaaaagcgaacaacagtcccaggcagaagcgcgtgctaatctcgcacttgcagaagcggtaagcgcccaacaaaacgtagaaaccactcgccagactgccgaagccgatcgtgctaaacaagttgccctaatcgctgccgcgcaggatgcagaaaccaaagcggttgaactgaccgtgcgggcgaaagcagaaaaagaagccgcagagatgcaggcggcggctatcgttgagttagccgaagctacacgtaaaaagggtctggcggaagcagaagcacaacgtgcgctgaacgatgctatcaacgtactttctgatgaacaaaccagccttaaattcaaactggccttgttgcaggcgctgcctgcggtaatagagaaatccgttgagccgatgaagagtatcgacggtatcaagattattcaggtcgatggtctgaatcgtggcggcgctgcgggtgatgcaaacacgggtaatgtggggggcggaaacctggcggaacaagcattaagtgccgctctctcttaccgcacacaggcaccgctgattgactccttgctcaatgaaattggcgttagtggcggcagtctggcggcattgactagtcccttaaccagtacaactcccgtcgaagaaaaagcagagtaaaccctcttccaggaataatccctggcccaaaaagccggggattttttatatctgcgttccgctaaaaagtgcaaatgatcaggttgttgcagcattttgcgtgacggctcggggaaggcaaaactgcatcagagaaagcattgcgtggggtctggcgctcatcaacaatcggggagtcagcagggggctgaaacgggaaagcccctcccgaagaagggggccttacagaaggaaagggttatgatgaagctcgtcatcatactgattgtgttgttactcgtaagtttcgcagcttattaacagccaatcagaggggggagaaatcctccctcacccttgttcctttactttaggttgaaaaaaaatcagcgtcaagaaggtttcattaacacatatccctggcccaaaaagccggggattttttatatctgcgttccgctaaaaggtgcaaatgctcaggacgttgcagcgttttgcgtgaccgctcggggaaggcaaaattgcctctgggaaagcattgcgcggggtccggcgctcatcaacaatcggggggcagcaaggggctgaaacgggaaagcccctcccgaagaaggggccttgtataaggaaagggttatgatgaagctcgtcatcatactggttgtgttgttactgttaagtttcccgacttactaacaactcatcagaggggggagaaatcctcccttacccttgttcctttactctaggttgaaaaaacaacagcgtcaataggcctgccatgtacgaagcgagatctgtgaaccgctttccggttagccttttttatcctgttggatcttcttgatgatgttggtcgtgctgcaaccgtcttcaaagttgagcaccaacacttcgccaccgttggcccagacttctttactcccggcaatctcttctggtttatagtcgccgcctttcaccagcagatctggcaagatcccggcgatcaagcgctgcggcgtgtcctcttcaaagctcactacccagtcgaccgcttccagtgcgcccagcacaatcatacgctgttcgagtgggtttaccgggcgggaatcccctttcagccgtttggtggaggcatcgctgttgacggcaacaatcaagcggtcacccagcttgcgggcatttgccagataagagacgtgcccggcgtgcaggatgtcaaagacaccgttggtcatcaccactttttcaccacgtttacgcgctgccgctacggccagcttcagttcctcttcggtcatcacgccaaagcctgtatctgcacgtccacgtacagcattttccagctcgatcgggctaaccgtggaggttcccagtttgccgaccaccacgccagccgccgcattggcaaagaagcaggcttcttccaggctattacccgctgccagcgttgccgccaggacgccaatcaccgtgtcgcccgcaccggtaacgtcatacacttcctgcgcttgggttggcatatgcagcggcgctttacccggttgcagcaggctcataccctgttcggaacgggtcactaacagagcgctgagttcgtaatcggcaatcagtttcatgccgcgctcaacaatctcttcttcggtcttacatttaccgacaacagcttcaaattcgctgagattcggcgttaacagcgtagcgccgcggtagcgctcaaaatcggtaccttttggatcaatcagcaccggaacacccgctttacgcgccagttggatcatctgctgtacgcttgccagcgcacctttggcgtagtcagaaagcaccagcgcgccaatgctactcagcgcctgattaatccgctcgtgcagcggctgcggatcaacaccttcgaaaccttcttcaaaatccagacggatcagctgttggttgcgggaaagtacccgtaatttggtaatggtcggatgcgtcggtacagaaacgaagtcgcatttgacgttgacgtcggccagagatttactcagcgcgcgcgctgcatcgtcaatgcccgtcaacccgaccaggcgtgcattagcaccgagagaagcgatattcatcgccacgttagccgcgccgcccggacgttcttcgatggtattcactttaaccacgggcaccggcgcttccgggctgatacgactggtggggccgtaccagtaacgatccagcatcacatcaccaaccaccatcactcctgcacgttcaaactctggcagcgttactttcattcctgtctcctgagagattcaaaatttgcgcgcgataataccatacttcattcttccaccagccacttctgccagcttgcccgcaccagttcacgctctgcggtgaagcaatcctcgctcacatggcccggcaattcctgtaatgccagatgatgaagttcatcgcgaagcgtagtgtaagcacgggtcagcgccatcgcttcctgctcttccataatgtcgttttgcgccagtagttccagaatacgcacgttgtcactccagcgcgttaacttcggtttttcatgagcgtagcgcaacaccagatattgggtaataaattcgatatcggtaattcccccttcatcagctttgatatcaaagcgatcgcgatgtttattgccgagatgagcgcgcattttctcgcgcatttcccgcacttccgtttgcagagttttaccttcacgcggcagcgtcataatctcgcgacgcactgcgtcaaagtgcgcggtgagctgcggatcgccgtacactacacgcgcacgcaccagcgcctgatgttcccacgtccaggcctcgtttttctgataatcggcaaatgcttctgcggatgtcaccagcattcccgccgccccggacggacgcagtcgagcatccacttcatacaaaatgccggaagaggtacgcgtactgaacagatgcataatgcgttgcgccagacgcagataaaactgccgcccgtcgatttcccgctcaccgtcagtcatcgcatccattgggcaatcatggaggaagataaggtcaagatcggaactgtagcctaactcccagccgcccagcttgccgtagccgaccaccgcaaaaccacgcccttcgcgttcgttcaggtgattcggcttaccgtagcgggcaaccatttgaacccacgcctgctgaacgacggcatctatcatggcttccgccagccaggttaagtgatcgctcactttcatcaccggtagcgtaccggcgatatccgctgcggcgatgcgtaacagctgcgcctgtttgaactgacgcagcgcctcaagctgttgctcttcgtcatcttccggcacgcgcagcaaatactggcgcaactcatcgcggtaggcatcggtcgccgtcggctggtaaagggtgtttggatcgagcaattcatccagcaataatggataacgcgccagctggctggcaatcatcgggctcgcggcacacagagaaatcaaatgtttaagcgccgcggggaattcactgagcaattctaaataggtggtgcgggtaacaatccccaccagcaaggcggtaatgcggctcagcgtaacggcagcgtcttcacgcgcacagacatcacttagcagatgcggcatcagatggtcgagcacctgacgtcctcgcggcccgatggtgcgcttatccagctctttgcggaaatcggcaatcagcgttagcacctgtttgcgatcatcctcgctaagatgcgccagcactggcgtagtgtcatcttcctgcaacgcatcctgccacagctcacgccactgttcgctcaggctctcttcctgagtttcactttcatcgtcgccaatcaattcattaaacacccggcgcacattggtcatatgtgcggtcagcgccccggtcagttgcggccagtcagcaaagtccatcgcccacgccagccgcgcacgattaagctcatcagaaggaagcgtctgggtttgttcgtcgttaatgctttgcagcaggttttccagacgccgcaggaacagatacgccactcgcaattgttcagcatcgttttcagaaagcagatgcagctcggcaatggcgctgagcgttggcagtaaagagcggctttgcaggctcggttcgcgtccgccgcgaatgagctggaacacctgaacgataaattcaatttcgcgaatgccgcctgcgccgagtttgatattgtcggtcaaaccacgtcgacgcacttcacgggcaatcatccctttcatgttgcgcaggctctgaatcacgctgaaatcgatgtaacgacggaaaacaaacgggcgcagcatcgcacgcaactcgttagcatagacgccttcgctatcgcccataatccgcgccttgaccatcgcgtaacgctcccagtcgcgcccctgctcctggtaataatcttccaacgcggcaaagctcagcaccagcgggccactttcgccaaacggacgcagccgcatatccacgcgatagacgaagccatcctgcgttggttgatccagcactttaatcagccgctgccccatgcgggtaaaaaactgcgcgttatccagttcccggcgtccaccctgcgtacaaccatgttccggccaggcaaaaatcagatcgatatcagaggagaaattcagctccccaccgcccagcttacccatgcctaaaatcagcagcggttgcgcttcgccctgcgcattgcacggcgttccccactcgcggcagcaggcgtcatacagccagtcacgcgccgcaacaatcagcgtctccgccagatagctgagctgctgcaatatgctctcttcagtaaccagtgccagcgtttgcgcccaggcgatgcgcaccataatgcgccgccggaatagccgcagctcgcgcattaacccggcttcgtcactcacattacagagcgcctcctgcaaccatgccgcgtaatgctgccattcgtcggcctgcggcggttggctttccagttccgtcagccactctggatgcgcaatcacgctgtcctgcacaaaatcactaaaagtaagtacactcttcgcctgtgcgctaagactttcctcggctaaaggctctggcagccgctcaacaacggtctgccagtactgctgtaacggactagagagcggcttcataagcgattttatccttgcctgattaacgttttccgctgtgcaaccagaacggttcctgattgtttgcctcattacggaaatgttcaatttcgatgcgttgcccggtcgcaatagcgtgatgcagcccctgccagttctccagccaggcttgcgcgacgacaggatcatagtaacccgccagcaacagtatactgtcaatatcacgcgtcaggcgtggcaactggtcacggtagcgatcgcctaacggctggcagaaaacgcttttcagttcagcggcatggcgggaaagatggatatcggcaaagcgtttgaaggagtcgctgattttgccctgcgctttggcatctaaaaatggctgccatgctttgcttaccaaccattcggtcaacgccagcttcgccattgccgtttcggtagagtagaccgccgtcacggcagacaccgcagaagcaatggtcgcctcgcattgagtcagcagatcacgtaagtgagtgctcgctttacgcggcacaataccaccgaacagcatcagcgtatgacggaccaggctaatggctgccagcacctgttctttcgccgcatcgttgccgcgtacccacagttcttcatgatactgccattgcgctaacgccagctcgagcgccgcttccagcccctgttccacatcggcttttgccgcaacatgcaaaatggtggtcggtttgatttcacgcgccggattgccctgcgccagatgatagccacgcgccgctttgctcaggctgccctggcgtaatccggtttggcttaccagttggttcgccagtttcagcaccgcgcgcgtgtcgccgctaagcagttccagttccagctcacagataggttcagcaaattcacccgctttcacttccccctggtcgagggcgatttcaatttggctaccatcgaccgccaccagccatttttcgcgataaaaatcggtgctgaacagcggctgcacgcgggaggcgagatcggcgggcaattcgccgttcggccagacttccgtcggtaactgcgccaggtcgagcgtcggttcgctcaacgccacgttatattccgggcgctgatgtaagccgcctgtcactcttcctgcaactttcatggtcatctcatagcgaccgttttcgccacgaatacgtaagcccatatcgtgcccacgcagccagttatccggcgtttcgtagtaaatattcagcaactgcacggggtcatggtgctcgccgcccagcgtattgagatggtcacgcaacgcctcaacggcactgtgattaacaataaactttaattcgatttcctgagccatggcctttacttatcggttatgtcacataagtgacgatgaacggcgaacttaatgcgatcttttttgtcagtagatagtattttgcgccaaattgccatgcaacgggcaatttgacgggcgtaaaagtttgaagcagtggcaagacctgacacagaggattccgattgatgtcgaatgctttgcgtagcgacactgatgccactactatcgttccactttccatgacaataacgacagcctgatgccaaaattacgcctgatcggattaactttactcgcacttagcgcgactgccgtcagtcacgctgaagaaacgcgctatgtttccgacgaactgaatacctgggtccgcagcggtccgggagatcattatcgcctcgtgggcacggttaacgccggcgaggaagtgaccttattacaaactgacgccaacaccaattatgcccaggtgaaagacagctctggccgtaccgcctggatcccgttgaaacaacttagcactgagccaagcctgcgctcccgtgtgccagatctggaaaatcaggtcaaaaccctgaccgataaactcaccaatatcgataacacctggaatcagcgcaccgcagaaatgcagcaaaaagtggcgcagagcgacagcgtgatcaacgggttaaaagaagaaaatcagaaactgaaaaacgagctgattgtcgcgcagaaaaaggtcgatgccgccagcgtacagctggatgacaaacagcgcaccatcatcatgcaatggtttatgtatggcggtggcgtgctggggcttggcttgctgctcggtctggtactgccgcacctgatcccaagccgcaaacgcaaagatcgctggatgaactaaatcgccttcttcgttgcactgtcttattattaggaattgtgtatttgacgaagggatgatggcgtgaagatttatctggtcggtggtgctgttcgggatgcattgttagggctaccggtcaaagacagagattgggtggtggtcggcagtacgccacaggagatgctcgacgcgggctaccagcaggtaggccgcgattttcctgtgtttctgcatccgcaaacgcatgaagagtatgcgctggcacgtaccgaacggaaatccggttccggttacaccggttttacttgctatgccgcaccggatgtcacgctggaagatgatcttaagcgtcgcgatctgaccattaatgcgctggcccaggacgataacggcgagattatcgacccgtacaacggtctgggcgatctgcaaaatcgtctgttgcgccatgtttcccccgcttttggcgaagatccgttacgcgtattgcgcgtggcgcgttttgctgcgcgttatgcccacctcggttttcgtattgccgatgaaactctggcgttgatgcgcgagatgacccatgcgggtgaactggaacacctgacgcctgaacgggtatggaaagagacggaaagcgccctcaccacccgcaatccacaggtgttcttccaggtactgcgcgattgcggcgcactgcgcgttttattcccggaaattgacgcactgtttggcgttccggcccctgccaagtggcatccggaaatcgatacgggtattcataccttaatgacgctcagtatggcggcgatgctgagtccgcaggtcgatgtccgtttcgcaactttatgccacgatctcggtaaagggctgacgccgccagaactctggccgcgtcatcatggtcatggcccggcgggtgttaagttagtggaacaactatgccagcgtctgcgcgtgccaaatgaaattcgcgatttagccagactggtggctgagtttcacgatctcatccacaccttcccaatgctgaacccaaaaaccatcgtcaaattatttgattccatcgatgcctggcgtaaaccgcagcgtgtcgagcaactggcgctgaccagcgaggctgacgtgcgcggcagaaccggttttgaaagtgcggactacccgcaaggccgctggttgcgcgaagcctgggaagtggcgcagagtgtgccgacaaaagccgtcgttgaagcgggatttaaaggtgtggagattcgcgaggagctgacccgacggcggattgcggcggtagccagctggaaggaacaacgttgcccaaagcctgaatgagtattgggcattttgccggatgcggcgtaaacgccttatccggctacatgtcaacgacagttgtaggcctgataagacgcgcaagcgtcgcatcaggcgttgattgccggatgcggcgtgaacgccttattcggcctacgcaatcgttgacaacgccaagcatccgacactattcctcaattaaaagaacacgacatacaccgcagccgccacaataaagcgataaatggcgaacgggataaagctaatgcgcttaatcaattgcaggaaggttttaatcgctatcagcgccaccacaaaagcggtgataaacccaacggcaaacatcgggatatcgccgcttgtcaggaagccccagcttttgtagagatcgagcgccgttgcgcccatcatcatcggcaccgccagcaggaagctaaactcggaagcagcgtaacggctcacccccatcagcatcccaccactaatggtcgccccggaacgggagaaacccggccacagcgccagacactggaaacagccaatcataaatgcctgacgataggtcatatcatcaagacccggcgcacgcggctctttcggcttcaggcattcggcggcaatcagcaacaaaccgccaacgaccagcgcatacatcacatttatcgggttaaacaaactcttaatcgtgtcgtggaacaacagccccaataccaccgccggaatcatccccagcaaaatgtggatcagcgttaaacgacctttgctttcaccttcgtgctgcaacgggcggccaaagtggatgccaatcaggccaaacagacgccgccagaacatcactactaccgccagaatacttcctaactggatcacaacttcaaaggttttcgccgtgtcgccctcaaaccccaacaagtgaccgacaataatcatatggcccgtgctggataccggcagaaattctgtcaatccttcgaccacacccaatattgccgctatcagcaggctgtgcatatcgctcatcaataaacccctaaattattaaaatgtaccgcttgtccgaactactgcgtatgaccaggttataaccgtttggtttaacagctgtaaaattaattattttctttcagattattgccacgctcaatgattacgccaacattcgccgcccgcgccactgcgcctggcttgctgagtttgatacgcacccacgggctgttgaagcgtgctaacagcagctccgccacctcttcagccacgcgttccaccagcgcaaaacgcgccccctcgacgtggctgaccaccgtttctgcaatgtcagcgtaactgaggcaatccgccacatcatcacttttcgccgctttacggttatcccacgccatttcgatatcgaacactaacttctgttcgatggtctgttcccagtcgtaaacaccaatagtggtgattacgctaagttgctctataaatacaatatccatcacgtcctgcctgctttttggctaaccggataccacttccggcgaaatgtgcgtattatccacagattcatcgttgaacacgaattttcaaaacggaacagcttatgagtgcaatcgcgcctggaatgatcctcatcgcgtacctctgcggctccatttccagtgccattctggtttgccgcttgtgtgggctgcccgatccgcgaaccagcggctccggcaatccaggcgcaaccaatgtgttacgtatcggtggcaagggagcagccgtagcagtactgattttcgacgttctgaaaggaatgttgcccgtctggggcgcgtatgaattaggtgtcagccccttctggctaggcttaattgccatcgccgcctgtcttggacacatctggcccgttttcttcggatttaaaggaggaaaaggcgttgctaccgcttttggtgccatcgcacccattggctgggatctcaccggagtaatggcgggaacctggttactgaccgtgctattgagcggatacagcagcctgggagcgattgtcagtgcactgattgctccgttttatgtctggtggtttaagccacaattcaccttcccggttagcatgctctcttgcctgatcctgctgcgtcatcatgacaacatccaacgtctgtggcgtcgtcaggagacaaaaatctggacgaaattcaaaagaaagcgcgaaaaggatcccgagtgatttctggtggatttacatgacctgatagccttcatcgggcttgcccagccgttgctggcaccatgccgccagaaattccacgcagacacgtaatttcatgctgcgatagagcggctcccggtaaacagcccagatattggcgctttgtgcatactctggcaatacttgcaccagtttgccactctccagaaacggcaacacatcccactcggaacgcagcataatccctttgccctccagcgcccattgcagcacaatctcgccgctattggaggaaagatgcccgcttaccttcacgctttttttctcctgaccgttccccaactcccatattccatgggtcatatcgcgctctttggtcaccagacagtcatgacgacttaattcctgtagggattgtggctgcggatatttttgcagatactcaggtgctgcgcataatattcttttattttttgtcaaaagatgcgcaatataataatcaggaatttcgtcattaatacgaatatccagatcaatattatcctgcactaaatcaatttgccgatcgaacaattcaaaatgcacctgtaactcaggataattgcgcatcagttcggtaatagctggcgcaatatggctgcgcccaaaaccaaaactgcaaccaatacgaatcatcccctccgggcgcgttttgatttgcgtgacgtcatcgaccagtcgctgatattgggtgaggatttccaacgcatgttcgtaacaacgttggccactttcagtcagcgccacgccgcgagcggagcggttcagcagcgttgttgccagcgtattttcaaggatttggatccgcttggtgacaaatgcaggcgtctgcccaagcgtcgccgctgcggcgctaaaactcccgctgtgaacgatttctaccagtacctgcaagtctttggctaaaggccagctattcagcatcgttaattatccgcagttgtgataagcgcagtgtatttcgcaaaacattgccattccctgctctggcgcaatattcattcttattttcgcgttgattcacgaactgttaattacatattcacggtggcaaaaaatataaaaccacatttttagtggtagtttgtggcggtgaatttttccagacaaatacaaaaactggagttgccatgatgagcgaaagtaataagcaacaggcagtgaataagttgacagagattgtcgctaactttaccgccatgatttctacccgaatgcctgatgacgtggtggataaactaaaacagctaaaggatgccgaaacgagcagcatggggaaaattatctaccatacgatgttcgacaacatgcaaaaagcgattgacctgaatcgtcctgcctgtcaggacaccggggagattatgttcttcgttaaagtcggttcccgcttcccactgcttggcgagctgcaaagcatactcaaacaagccgtggaagaggcaaccgtcaaagcgccactacgtcacaatgcggtagaaatttttgacgaagtaaacaccggcaaaaataccggtagcggcgtaccgtgggtcacctgggacatcatccccgacaatgacgatgcggaaatcgaagtttacatggcaggcggcggctgcacgctacctggccgcagcaaagtgttaatgccgagtgaaggctacgaaggcgtggtgaaattcgtcttcgaaaatatctccaccctcgccgtaaacgcctgtccaccggtactggtgggcgtgggcatcgccaccagcgtggaaaccgccgccgtactcagccgtaaagccattttgcgcccgattggcagccgccatcccaatccaaaagcggcagaactggagctacgcctggaagaaggactcaaccgtctggggattggtccacaagggctgaccggcaacagtagtgtgatgggcgtacatatcgaatctgccgcccgccatccgagtaccatcggcgttgctgtctctaccggctgctgggcgcatcgtcgcggcacgctgctggttcatgccgatctcacctttgaaaatctgtctcacacccggagcgcgttatgaaaaagatcctgacaaccccgatcaaagctgaagatctgcaagatattcgcgtcggcgatgtgatctacctgaccggtacgctggtgacctgccgcgacgtttgtcaccgccgtttgatcgaactgaaacgtccgatcccttacgatctcaacggcaaagcgattttccacgctggccccatcgtgcgcaaaaacggcgacaaatgggagatggtctccgtcggcccgacaaccagtatgcgtatggaaagttttgaacgtgaatttattgagcagaccggcgtgaaactggtggttggcaaaggtggtatggggccgctgaccgaagaaggctgccagaaattcaaggcgctacatgtgattttcccggcaggctgcgcggtgctggcggcaacccaggtggaagagattgaagaagtgcactggacagagctcggaatgccggagagtctgtgggtctgccgggtcaaagagttcggcccgctgattgtctctattgatacccacggcaacaacctgatagccgaaaacaaaaagctgttcgccgaacgccgcgatcccatcgtggaagagatctgcgagcacgtccattacatcaaataaccctcccggagaggctcacccctctcctttttcgcaggcataacacgatgaaaccttccactgaatggtggcgatatcttgcgccgctggcggtcatcgccattattgctctacttccggttcccgcagggctggagaaccatacctggctctactttgccgtttttactggcgtgatcgttggactgatcctcgaacccgtgccgggtgccgtggtggcgatggtgggtatatccatcatcgccatactctctccctggctgctgttcagcccggagcagctcgctcagccaggctttaaattcactgcaaaatccctcagctgggccgtttccggtttttctaatagcgttatctggctgattttcgccgcctttatgtttggcacaggctatgaaaaaaccgggcttggacgccgcattgcgctgattctggtgaaaaagatgggacatcgcacgctgtttctcggctatgcggtgatgttctccgagctgatcctcgcacctgtaacaccgtccaacagcgcgcgtggtgcggggattatctatcccatcatccgtaacctgccaccgctctatcaaagtcaaccaaacgacagcagtagccgcagcattggcagctacatcatgtggatggggattgttgccgactgcgtgaccagcgccattttcttgacggcgatggcaccaaacttgctgttaattggactgatgaaaagcgcatctcacgccacgctgagttggggcgactggttcctcgggatgttgccgctcagcattttactggttctgctggttccctggctggcttacgtgctgtacccgccggtactgaagtctggcgatcaggtgccgcgctgggcagagacggaactgcaggcaatgggcccgctctgtagccgtgaaaaacggatgctggggctgatggtaggcgcgctggtgctgtggattttcggcggtgattatatcgatgccgcgatggtcggttacagcgtggtggcactgatgctgcttctgcgcattatcagttgggacgacattgtcagtaataaagcggcgtggaacgttttcttctggctggccagccttatcaccctcgccaccggactcaacaacaccggttttattagctggtttggcaaactgttagcaggcagcttaagcggttatagcccaacgatggtgatggtggcgttgattgtggtgttttatctactgcgctactttttcgccagcgccacggcgtatacctccgctctcgcaccgatgatgattgctgctgcgctggcgatgccggaaatcccgctgccggtgttctgcctgatggttggtgcggcaattggtctggggagcattcttacaccatacgccaccggccccagtccgatttactacggcagtggttatctgccaacggcggattactggcgactgggggcgatttttgggctgatattcctcgtattgctggtgattaccggcttactgtggatgcccgtggtgttgctttaagtgaggacggtgccggaaattgctctccggcacccaatagttttacgcagccggtaactccgccagcggccagcgcggacgcacgctaacgccgagatccgccgtcgcgcctgctttaaaccgcaccattccggcataggcgatcatcgcgccgttatcagtacaaaattccggacgcgcgtagaacacttcgccgcggcgttttttcatcatttcagccagcttcgcccgtaacgtacggttagcactcacgccgcccgccatgaccagtcgcttaaagcccgtctgatccagcgcccgcttgcacttaatcatcagcgtatcgaccaccgcatcttcaaaggcgcgggcgatatcagcacgcgtctggtcgtcggtgccgttgtcacgaatggtatttgccgcgaaggttttcaggccggagaagctgaaatccagccccggacggtcggtcatcggacgcgggaagacaaagcgcccggcagtaccctgagccgccattttgctcagtaacggcccgccaggataatccagccccagcagcttcgcggttttatcaaacgcttccccggcggcatcatcgatagactcgccgagcagctcgtactgaccaatgccagtcacgctgattaactgcgtatgaccgccggaaacaagcagcgcaacaaacggaaattccggcgggttatcttccagcatcggcgctaacagatgcccttccatatggtgtacagggatcgccggaacgtcccaggcaaacgccagagaacgccccacggtcgcgccaaccagtagcgcgccgactaatccagggcctgcggtataggccacagcatcaatgtcttttgccgttaaaccagactcctttagcgccgcctggatcaacggtacggttttacgcacatgatcgcgggaggccagttcaggcacgacgccgccgtagtcagcgtgcaatttcacctgactatacaattggttggctaacaaacctttttcatcgtcgtaaatggcgatgccggtttcatcgcaggaagtttcaatacccagtacacgcatgacttgttttacctcgctttattaccgcgcagtgtaggaccaatgcgggttgatgtaaaactttgttcgcccctggagaaagcctcgtgtatactcctcacccttataaaagtccctttcaaaaaaggccgcggtgctttacaaagcagcagcaattgcagtaaaattccgcaccattttgaaataagctggcgttgatgccagcggcaaaccgaattaatcaaaggtgagaggcacatgccggtaattaaagtacgtgaaaacgagccgttcgacgtagctctgcgtcgcttcaagcgttcctgcgaaaaagcaggtgttctggcggaagttcgtcgtcgtgagttctatgaaaaaccgactaccgaacgtaagcgcgctaaagcttctgcagtgaaacgtcacgcgaagaaactggctcgcgaaaacgcacgccgcactcgtctgtactaattccccgagagcgttgctctccgatcagaccgagttgtagttgtaaggccgtgcttccgaaaggaatgcgcggcttattttcgtttatgaattgctaaaaatcggggcctatggctggacgaatcccacgcgtattcattaatgatctgctggcacgcactgacatcgtcgatctgatcgatgcccgtgtgaagctgaaaaagcagggcaagaatttccacgcgtgttgtccattccacaacgagaaaaccccgtccttcaccgttaacggtgagaaacagttttaccactgctttggatgtggcgcgcacggcaacgcgatcgacttcctgatgaactacgacaagctcgagttcgtcgaaacggtcgaagagctggcagcaatgcacaatcttgaagtgccatttgaagcaggcagcggccccagccagatcgagcgccatcagaggcaaacgctttatcagttgatggacggtctgaatacgttttaccaacaatctttacaacaacctgttgccacgtctgcgcgccagtatctggaaaaacgcggattaagccacgaggttatcgctcgctttgcgattggttttgcgccccccggctgggacaacgtcctgaagcggtttggcggcaatccagaaaatcgccagagtttgattgatgcggggatgttggtcactaacgatcagggacgcagttacgatcgtttccgcgagcgggtgatgttccccattcgcgataaacgcggtcgggtgattggttttggcgggcgcgtgctgggcaacgatacccccaaatacctgaacagcccggaaacagacattttccataaaggccgccagctttacggtctttatgaagcgcagcaggataacgctgaacccaatcgtctgcttgtggtcgaaggctatatggacgtggtggcgctggcgcaatacggcattaattacgccgttgcgagcttaggtacgagtaccaccgccgatcacatacaactgttgttccgcgcgaccaacaatgtcatttgctgttatgacggcgaccgtgcaggccgcgatgccgcctggcgagcgctggaaacggcgctgccttacatgacagacggccgtcagctacgctttatgtttttgcctgatggcgaagaccctgacacgctagtacgaaaagaaggtaaagaagcgtttgaagcgcggatggagcaggcgatgccactctccgcatttctgtttaacagtctgatgccgcaagttgatctgagtacccctgacgggcgcgcacgtttgagtacgctggcactaccattgataagccaagtgccgggcgaaacgctgcgaatatatcttcgtcaggaattaggcaacaaattaggcatacttgatgacagccagcttgaacgattaatgccaaaagcggcagagagcggcgtttctcgccctgttccgcagctaaaacgcacgaccatgcgtatacttatagggttgctggtgcaaaatccagaattagcgacgttggtcccgccgcttgagaatctggatgaaaataagctccctggacttggcttattcagagaactggtcaacacttgtctctcccagccaggtctgaccaccgggcaacttttagagcactatcgtggtacaaataatgctgccacccttgaaaaactgagcatgtgggacgatatagcagataagaatattgctgagcaaaccttcaccgacagtctcaaccatatgtttgatagcctgcttgaactgcgccaggaagagttaatcgctcgtgagcgcacgcatggtttaagcaacgaagaacgcctggagctctggacattaaaccaggagctggcgaaaaagtgatttaacggcttaagtgccgaagagcgatcgggaagcccccgacagccgcactgagaggcagcggcaaatatataagtacgccctcgtaattatcgttggcggtaaacaaccgttggatttcagcgttaacggctgaaggacatcgggtcaatcgcccaacaccaacctcatgaaataagtgtggataccgtcttatggagcaaaacccgcagagtcagctgaaacttcttgtcacccgtggtaaggagcaaggctatctgacctatgccgaggtcaatgaccatctgccggaagatatcgtcgatagtgatcagatcgaagacatcatccaaatgatcaacgacatgggcattcaggtgatggaagaagcaccggatgccgatgatctgatgctggctgaaaacaccgcggacgaagatgctgccgaagccgccgcgcaggtgctttccagcgtggaatctgaaatcgggcgcacgactgacccggtacgcatgtacatgcgtgaaatgggcaccgttgaactgttgacccgcgaaggcgaaattgacatcgctaagcgtattgaagacgggatcaaccaggttcaatgctccgttgctgaatatccggaagcgatcacctatctgctggaacagtacgatcgtgttgaagcagaagaagcgcgtctgtccgatctgatcaccggctttgttgacccgaacgcagaagaagatctggcacctaccgccactcacgtcggttctgagctttcccaggaagatctggacgatgacgaagatgaagacgaagaagatggcgatgacgacagcgccgatgatgacaacagcatcgacccggaactggctcgcgaaaaatttgcggaactacgcgctcagtacgttgtaacgcgtgacaccatcaaagcgaaaggtcgcagtcacgctaccgctcaggaagagatcctgaaactgtctgaagtattcaaacagttccgcctggtgccgaagcagtttgactacctggtcaacagcatgcgcgtcatgatggaccgcgttcgtacgcaagaacgtctgatcatgaagctctgcgttgagcagtgcaaaatgccgaagaaaaacttcattaccctgtttaccggcaacgaaaccagcgatacctggttcaacgcggcaattgcgatgaacaagccgtggagcgaaaaactgcacgatgtctctgaagaagtgcatcgcgccctgcaaaaactgcagcagattgaagaagaaaccggcctgaccatcgagcaggttaaagatatcaaccgtcgtatgtccatcggtgaagcgaaagcccgccgtgcgaagaaagagatggttgaagcgaacttacgtctggttatttctatcgctaagaaatacaccaaccgtggcttgcagttccttgacctgattcaggaaggcaacatcggtctgatgaaagcggttgataaattcgaataccgccgtggttacaagttctccacctacgcaacctggtggatccgtcaggcgatcacccgctctatcgcggatcaggcgcgcaccatccgtattccggtgcatatgattgagaccatcaacaagctcaaccgtatttctcgccagatgctgcaagagatgggccgtgaaccgacgccggaagaactggctgaacgtatgctgatgccggaagacaagatccgcaaagtgctgaagatcgccaaagagccaatctccatggaaacgccgatcggtgatgatgaagatagccatctgggggatttcatcgaggataccaccctcgagctgccgctggattctgcgaccaccgaaagcctgcgtgcggcaacgcacgacgtgctggctggcctgaccgcgcgtgaagcaaaagttctgcgtatgcgtttcggtatcgatatgaacaccgactacacgctggaagaagtgggtaaacagttcgacgttacccgcgaacgtatccgtcagatcgaagcgaaggcgctgcgcaaactgcgtcacccgagccgttctgaagtgctgcgtagcttcctggacgattaatcggtaggccggatcaggcgttacgccgcacccggcactaggccctctgcacaaacgccaccttttcggtggcgttttttatcgcccacgcactaccagcgcctggtccagctcgcgatacgcttcaaccagtttctccagactaacgcgacttaaaccgctgggatttggcagcacccaaatctgcgtgctaccaatggtgagcgtttgtttcccccactgtgcaccgcgctggctgaatccctgttcatatgcttgtttgcccagaatcgccaacgcctgcggctgataatcttcaattttttcaatcagcttacgcccgcctgcgtgtagctcctgcttactaacttcattggcttgcaccgttggacggtctaccagtttggtgacgccacaacgataatccagcagatgctgtgcctcctgcggcttcaactgacggtcggtaaacccggcctgatatatcaccttccagaagcgatttgccggatgagcaaagggaaaaccagtcccggcggaactaagcccagggttgataccgcaaaacacgacccgtaaccctggagccaaaatatcctcaaccatatttactcctttctaacatcaccaggaaaagtataacggattgaaaatacattgtttataaaaacagcaggcgcgcggtaatggctggattgcgacacggagttactttataatccgctaccatggccccttagctcagtggttagagcaggcgactcataatcgcttggtcgctggttcaagtccagcaggggccaccagatatagcaaaggctgacgagaaatcgtcagcctttttctttttatatatcagttactttgcgtgccagtaagccgctgcacgtacccgctgtgggtcatactgttccgcttcaaagcggcggcttaaattcttaacgactttaccttcgccggttatccagatgaagtaatcatcggcagggatttgcatctgcgccagacgcgcatctaccgcctgctcatcatgtgccagccattcgatattaaaaccatcaaggtgcgcgagataatcctgacaggcgttatcccgcacgctaaccagcgcactaacttgcggtttaacggcaagtttgctcaacgtttccaggcggcggcgcaatgcaggcattccggattcatcgcagacatacagctgatacgcgtaatcttccggcaccaccaggctaccgcgcggacctgccaccgtaagtttatcgcccggttgcgcctgcatcgcccagccgctggcgaccccaccgtcgtgaataaagaaatcaatcgccagttcatggcgtagttcgtcatacagcggcgtatagtcacggctcggtgggcgtggtccttccggccagacgatgccctcttccgttaccgttggcggcacaaagtgagcgtcaggttgaggaaagaagagtttgctgtgatcgtcaaagccacggcttgtaaaaccgtccagcgcctcgccgccgaggacaatgcgctgaaaaccggcgctgatgcgctcaacgcgtaacacagtcagttcacggaagcgcagatcattgcgaacgcgctgcgggtagcggggggtgttattcattgttatcgccttcgtgatggtaatcagatatatctaaataaaactcgcaaatgataatgattgttaatcatgataaatgcaagcgatttgtagaactgatatgtctatagtctgataagacgaaccgcctcttctcaggcatcattactcaacgccggatgcggcgtgaacgccttatccggcctacgtgtgagatgagtccacgtttaaaaatcatttttacacttgcaagaacgctcatatcagatataaattagatatatctaattaagcaaaaggaggctgatatgagccatcatcacgaagggtgttgtaaacatgaaggccagccacgccatgagggctgctgcaaaggtgagaagagtgaacacgagcactgcggacacggtcaccagcatgaacacggtcaatgctgcggtggtcgccacggtcgcggcggcggtcgtcggcaacgtttctttggtcacggtgaattacgtctggtgattctggatattctcagccgcgatgacagccacggttacgaattgattaaagcgattgagaatctaacccaggggaattacaccccaagcccgggcgtcatctacccaacgctggattttctgcaggagcagagcctgattaccatccgcgaagaggaaggaggtaagaagcagattgcgctgaccgaacaaggcgcgcagtggctggaagaaaaccgcgaacaggtggagatgattgaagaacgcatcaaagcgcgttgcgttggcgcggcgctgcgccagaacccgcaaatgaagcgggcgctggataattttaaagcggtgctggatttacgcgtcaaccagagcgatatcagtgatgcacaaataaaaaagatcattgcggtgatcgaccgcgccgcttttgatattacgcaactggattaatcgccgcatccgccagtggcgcggtgcaattgccggatgcgacgcttgacgcgccttatccggcctacacccgctacacaccccgcaggcctgataagatgcgccagcatcgcatcaggcattgtgctccaaccgccggatccggcataccgattaatgcagtaccgtcaccgcgtcttccagtcggctggcgcggtgtttcaccatcgcgctcacctgcgcactctcttccaccagctcggcatttttctgggtgatcaggttaagctcatccactgcacgggtcaggctggaaagcccatcggcctgttccagcgtactatggctaatctgggcgatcaactgggtgacgtttttcacctgtgccacaatatcttccatcgtccgtccggcggcgtgtacctgctggctaccggattgcaccttatcagcactggcatcaatcagcttgcgaatatcgttggcagcattagcgctgcggctggctaaatgacgcacttcccctgccaccactgcaaaacctttgccctgttcgccggcacgcgccgcttccaccgccgcattcagggccagaatattggtctgaaacgcaatatcgttaatcaggctagtaatggtgccaatgcgctgggtactgtcggcgatatcgtccattgtcttgatcaccgtggtcatcgcctccccaccctgcactgccgcattactggcagtgatactcagtttatcggcagcgctcgccgtggcagagttctgtttcacgctcgccgccatttggttcatggtcgccaccgtttgctgaacgttatcaactgtctgctgggtatgttcgttcagttcatcggtgcctttcgccagcgtctcactgccatttctgacactggacacctggctactgacatcgttaattagccaacggcacatcaggccaagttgccctaccgcacgtaatgtcagccccagctcatcgctgcgattcagatgctcaacactattacgttctccggtcgccaccttcagtgcctgatgggcaacattttctatcgggcgcacaatctgccattcaaaacaggcgcttgccaacaataccactaacgcacagaggatatacgtcaccaccggggcagcaacaaaccaaagcatggccgccagcaagataaacatcagggtcatcactccacgcgcccgccagcgaagcggtaaactaggcagtttacccagccagcctttacgcaccaccaggcctttatgaatacgcttactggtacgtccggcgttcaacgctttgtacagcggctccaccgccgcgatctcttcatccgtcgcccgggtacgaatgctcatatagccactgatttttccctcgcgcaccatcggtaccgcattggcccgcacccaataatggtcaccatttttgcggcgatttttcacgatgccgctccagggctccccttttttcagggtgaaccacatatccgcaaacgccgcttttggcatatccgggtgacgcaccatgttgtgcggctgcccttgtaactcttgcaaggtatagccgctcacctgcacaaaagtgtcattagcatgagtgatatagctttgcagatcggtagtggacatcagagtggtatcgtccgccagcggggtattttgctgggtgacatacggatgagaagacatgttcgcgtcctgtgcaggttatatggttgttaacttcttgtcagagtttatgtcggccccgctgcggttatctttaaccgattaatttgatttagatcgcaatttgcgatttaaacacaaatctaattccttgatttaaaatactttcactctgttactatacgaaaacgttaattatcttgcccaaaaatcaggcaattattgccctgaaaacgtgcatttgcgcagcaatcatcaaatccatacccgacaaaaaccgtgcaaaataacaacaaatgttaacagatagcattaaatattgcacaaatgataaccgaatttgtgtttatcccgattttcgcgatcgcagccggagtggcgcaatccctgcaatacttaaatcggtatcatgtgatacgcgagcctccggagcatattttgaacaggttacctagcagcgcaagcgctttagcgtgcagcgcccacgccctgaatctcattgagaagcgaacgctggatcatgaggagatgaaagcacttaaccgagaggtgattgaatacttcaaagagcatgtcaatccggggtttttagagtatcgcaaatctgttaccgccggcggggattacggagccgtagagtggcaagcgggaagtttaaatacgcttgtcgacacccagggccaggagtttatcgactgcctgggaggttttggaattttcaacgtggggcaccgtaatccagttgtggtttccgccgtacagaatcaacttgcgaaacaaccgctgcacagccaggagctgctcgatccgttacgggcgatgttggcgaaaacccttgctgcgctaacgcccggtaaactgaaatacagcttcttctgtaatagcggcaccgagtccgttgaagcagcgctgaagctggcgaaagcttaccagagtccgcgcggcaagtttacttttattgccaccagcggcgcgttccacggtaaaagtcttggcgcgctgagcgccacggcgaaaagcaccttccgcaaaccgtttatgccgttactgccgggcttccgtcatgtgccgtttggcaatatcgaagccatgcgcacggctcttaacgagtgcaaaaaaaccggtgatgatgtggctgcggtgatcctcgaaccgattcagggtgaaggtggcgtaattctgccgccgccgggctatctcaccgccgtacgtaagctatgcgatgagttcggcgcactgatgatcctcgatgaagtacaaacgggcatggggcgcacgggcaagatgttcgcctgcgagcatgagaacgtacagccggatatcctctgccttgccaaagcgctcggcggcggcgtgatgccgattggcgcgaccatcgccactgaagaggtgtttagtgttctgttcgacaacccattcctgcataccaccacctttggcggcaacccgctggcctgtgcggcggcgctggcgaccatcaatgtgttgctggagcagaacttaccggctcaggctgagcaaaaaggcgatatgttgctggacggtttccgtcaactggcgcgggaatatcccgatctggtacaggaagcgcgtggtaaagggatgttgatggcgattgagtttgttgataacgaaatcggctataactttgccagcgagatgttccgccagcgcgtactggtggccggaacgctcaataacgccaaaacgatccgcattgaaccgccactgacactgaccattgaacagtgtgaactggtgatcaaagcggcgcgtaaggcgctggcggccatgcgagtaagtgtcgaagaagcgtaatatcaaatcggatggcgatacgacgtcgccatccgatctttttatacgacgcgtacgcccgcaggcatcatccgctccggcgttaacagcacgctttcactgccgtcatcggtttccgcacacaacagcatgcattcgctcgtttcaccacgcattttcgctttttgcagattgcataagaccaccaccgttttccccatcagctcttcttcgctgtagtacggcaccaggctggtcacggtttgcagcgttttttgccccacatcaacctgtacgatgtacagcttgtcggcgttttcatggcgtttcacttccacaatctttccgacgcgcatttccagacgtgcaaaatcagcgtaagccacggtttccattgcttcctcccttagggtaaaattttactaaactatagcaaaagtttttctcaatcctgtaggctaaaaatggagaatgcaggcgtgatcacattcgtgagccgctgtgttaccgttacagcgtcaaagaaacgcgctttatttactgaaaacaggtgacccgataagcacttcctctacaatgggggcgcacatcagggaaagtaaaaaaggtaaacatggcaacactaaaagacatcgcaatcgaagctggcgtatccctggcgacagtatccagggtcttaaatgacgatccgacattgaatgtgaaagaagagacgaaacatcgcattctcgagatcgccgaaaagctggagtacaagaccagtagtgcccgtaaactccagacaggtgcagtcaaccaacaccatattctggctatctacagctaccagcaggagctggagatcaacgatccttactatctggcgatccgccacggcattgaaacccagtgcgaaaagctgggcatcgagctcaccaactgttatgaacacagcggcttaccagacattaaaaacgtcaccggtattttaattgtcggcaaacccacgcccgccctgcgcgccgctgccagcgcgttgaccgacaatatctgttttatcgactttcacgaacccggcagcggttacgatgcggtggatatcgatctggcacgcatcagtaaagaaatcatcgacttctatatcaaccagggcgttaatcgtattggttttattggcggtgaagatgagcctggcaaggcggatattcgtgaggtcgcctttgcggaatatggccgactgaaacaagtggtacgcgaagaggatatctggcgcggcggtttttccagtagcagcggttatgaactggcaaaacaaatgctggcgcgggaagactatccgaaggcactgtttgttgcttccgattccattgctatcggcgtactgcgggcaattcatgaacgaggcctgaacatcccacaggatattagccttatcagcgttaacgatatccccaccgcgcgatttacctttccgccgctctccaccgtgcgcatccattccgagatgatgggaagtcagggcgttaacctggtgtatgaaaaagcccgcgatggtcgcgcgctgccgctgttagtcttcgttcccagcaaattaaaactgcgcggcacgacccgttaaatccccttacacactgtccggcaatcgtttttgccggacagtgctgccgtttattttcgtgatccagttaaagtaaatgcatttacctgctactttttagtaaaaattttactaaactccccagcaattacacaaactaccatcaccatgaatggttccgatttctctctaccgggaggccctatgaatcgctgggaaaacattcagctcacccacgaaaaccgacttgcgccgcgtgcgtacttttttagttatgattctgttgcgcaagcgcgtacctttgcccgcgaaaccagcagcctgtttctgcccttaagcggtcagtggaatttccacttttttgaccatccgctgcaagtaccagaagccttcacctctgagttaatggctgactgggggcatattaccgtccccgccatgtggcaaatggaaggtcacggcaaactgcaatataccgacgaaggttttccgttccccatcgatgtgccgtttgtccccagcgataacccaaccggtgcctatcaacgtattttcaccctcagcgacggctggcagggtaaacagacgctgattaaatttgacggcgtcgaaacctattttgaagtctatgttaacggtcagtatgtgggtttcagcaagggcagtcgcctgaccgcagagtttgacatcagcgcgatggttaaaaccggcgacaacctgttgtgtgtgcgcgtgatgcagtgggcggactctacctacgtggaagaccaggatatgtggtggagtgcggggatcttccgcgatgtttatctggtcggaaaacacctaacgcatattaacgatttcactgtgcgtaccgactttgacgaagcctattgcgatgccacgctttcctgcgaagtggtgctggaaaatctcgccgcctcccctgtcgtcacgacgctggaatataccctgtttgatggcgaacgcgtggtgcacagcagcgccattgatcatttggcaattgaaaaactgaccagcgccagctttgcttttactgtcgaacagccgcagcaatggagtgcagaatccccttatctttaccatctggtcatgacgctgaaagacgccaacggcaacgttctggaagtggtgccacaacgcgttggcttccgtgatatcaaagtgcgcgacggtctgttctggatcaataaccgttatgtgatgctgcacggcgtcaaccgtcacgacaacgatcatcgcaaaggccgcgccgttggaatggatcgcgtcgagaaagatctccagttgatgaagcagcacaatatcaactccgtgcgtaccgctcactacccgaacgatccgcgtttttacgaactgtgtgatatctacggcctgtttgtgatggcggaaaccgacgtcgaaagccacggctttgctaatgtcggcgatattagccgtattaccgacgatccgcagtgggaaaaagtctacgtcgagcgcattgttcgccatatccacgcgcagaaaaaccatccgagcatcatcatctggagcctgggcaatgaatccggctatggctgtaacatccgcgcgatgtaccatgcggcgaaagcgctggatgacacgcgactggtgcattacgaagaagatcgcgatgctgaagtggtcgatattatttccaccatgtacacccgcgtgccgctgatgaatgagtttggtgaatacccgcatccgaagccgcgcatcatctgtgaatatgctcatgcgatggggaacggaccgggcgggctgacggagtaccagaacgtcttctataagcacgattgcattcagggtcattatgtctgggagtggtgcgaccacgggatccaggcacaggacgaccacggcaatgtctggtataaattcggcggcgactacggcgactatcccaacaactataacttctgtcttgatggtttgatctattccgatcagacgccgggaccgggcctgaaagagtacaaacaggttatcgcgccggtaaaaatccacgcgcgggatctgactcgcggcgagttgaaagtcgaaaataaactgtggtttaccacgcttgatgactacaccctgcacgcagaggtgcgcgccgaaggtgaaacgctcgcgacgcagcagattaaactgcgcgacgttgcgccgaacagcgaagcccccttgcagatcacgctgccgcagctggacgcccgcgaagcgttcctcaacattacggtgaccaaagattcccgcacccgctacagcgaagccggacaccctatcgccacttatcagttcccgctgaaggaaaacaccgcgcagccagtgcctttcgcaccaaataatgcgcgtccgctgacgctggaagacgatcgtttgagctgcaccgttcgcggctacaacttcgcgatcaccttcagtaaaatgagtggcaaaccgacatcctggcaggtgaatggcgaaagcctgctgactcgcgagccaaagatcaacttcttcaagccgatgatcgacaaccacaagcaggagtacgaagggctgtggcaaccgaatcatttgcagatcatgcaggaacatctgcgcgactttgccgtagaacagagcgatggtgaagtgctgatcatcagccgcacagttattgccccgccggtgtttgacttcgggatgcgctgcacctacatctggcgcatcgctgccgatggccaggttaacgtggcgctttccggcgagcgttacggcgactatccgcacatcattccgtgcatcggtttcaccatgggaattaacggcgaatacgatcaggtggcgtattacggtcgtggaccgggcgaaaactacgccgacagccagcaggctaacatcatcgatatctggcgcagcaccgtcgatgccatgttcgagaactatcccttcccgcagaacaacggtaaccgtcagcatgtccgctggacggcactgactaaccgccacggtaacggtctgctggtggttccgcagcgcccaattaacttcagcgcctggcactatacccaggaaaacatccacgctgcccagcactgtaacgagctgcagcgcagtgatgacatcaccctgaacctcgatcaccagctgcttggcctcggctccaactcctggggcagcgaggtgctggactcctggcgcgtctggttccgtgacttcagctacggctttacgttgctgccggtttctggcggagaagctaccgcgcaaagcctggcgagctatgagttcggcgcagggttcttttccacgaatttgcacagcgagaataagcaatgaggatcatcgataacttagaacagttccgccagatttacgcctctggcaagaagtggcaacgctgcgttgaagcgattgaaaatatcgacaacattcagcctggcgtcgcccactccatcggtgacagtttgacttaccgcgtggagacagactccgcgaccgatgcgctatttaccgggcatcgacgctattttgaagtgcattactacctgcaagggcagcaaaaaattgaatatgcgccgaaagagacattacaggtagtggaatattatcgtgatgaaactgaccgtgaatatttaaaaggctgcggagaaaccgttgaggtccacgaagggcaaatcgttatttgcgatatccatgaagcgtatcggtttatctgcaataacgcggtcaaaaaagtggttctcaaagtcaccatcgaagatggttatttccataacaaataacaactacggcggcaaaaggagtttgccgccaccgctaccctactcattttcggagatgtgttatgtctgataccaaacgtaatacaatcggcaaattcggcttgctcagcctgacttttgccgccgtttacagctttaacaacgttatcaataataatattgagcttggactggccagcgcaccgatgtttttcctcgcgacgattttttattttattcccttctgtctgatcatcgcagaatttgttagcttaaataaaaacagtgaagccggtgtctacgcgtgggtaaaaagtagcctgggcggacgttgggcatttattactgcctatacctactggttcgtaaacctgttctttttcaccagtctgttgccgcgcgttattgcttatgctagctatgccttcctcggatacgaatatattatgacgccggttgccaccaccattatcagtatggtgctgttcgccttctccacctgggtttccaccaacggggcgaaaatgttggggccaattacctccgtcactagtacgctgatgctgctgttaacgctctcctacattttactggcaggtacggcgctggttggcggcgtacagcctgctgacgccatcaccgttgacgcgatgatcccgaacttcaactgggcgttcctcggcgttaccacctggatctttatggccgcaggtggcgcggagtccgtcgctgtgtacgttaacgacgtcaaaggcggtagcaaaagcttcgttaaagtgatcatcctcgccgggatttttatcggcgtactgtattccgtctccagcgtgctgattaacgtcttcgtcagcagcaaagagttgaaatttaccggcggaagcgtgcaggtattccacggcatggcggcgtattttggtctaccggaagcgttgatgaatcgctttgtcggtctggtgtcctttaccgcgatgttcggttccctgctgatgtggaccgcaacgccggtgaaaattttcttctccgaaatcccggaaggcatctttggtaagaaaaccgtcgaactgaacgaaaacggcgttccggcgcgcgcagcgtggatccagttcctgatcgtcatcccgctgatgattatcccgatgctcggttccaataccgtgcaggatctgatgaatactattattaatatgaccgccgcagcgtccatgcttccgccgttattcatcatgctggcttacctgaatttacgcgccaaattagatcacctgccacgcgatttccgtatgggctcccgccgcaccggtattatcgttgttagtatgctgattgcgatatttgccgtagggtttgtcgctagcacattcccgactggcgcgaatattctgaccatcattttttataacgtcggcggtattgttatcttccttggctttgcgtggtggaaatacagtaaatatataaagggattaacggctgaagagcgccatattgaagcgacgccagccagcaatgttgattaagcagaataataaaaaatgagcaggcattttccctcttcctggatgaggagagggaaaatagtttctgcctttatatttttataattacaacgataaaaggctgtactttttctttagctcatggattaacacaatgaaattaatcactgcaccatgcagagcattacttgctctgccgttttgctacgccttttctgcggcaggagaagaagcacgtccggcagaacatgacgacacaaaaacacccgcaattaccagcacatcttctcctagttttcgtttttacggcgaattaggggttggtggatatatggatttagagggtgagaataaacataaatacagcgacggtacctatattgaaggtggcctggagatgaagtacggctcctggttcggcctgatttacggcgaaggctggaccgtgcaggccgaccacgacggcaatgcctgggtgccagaccatagctggggtggtttcgagggcggaattaaccgtttctatggcggttatcgtaccaatgatggcaccgaaatcatgctcagtctgcgtcaggattccagcctggatgacctgcaatggtggggcgatttcacccccgatctgggctacgtcattcccaatacccgcgacattatgactgcgctgaaggtacagaacttaagcggcaactttcgttatagcgtcaccgcgactcctgccggacatcatgatgaaagcaaagcctggctacattttggcaaatacgatcgctatgacgacaaatacacctatccggcaatgatgaacggttacatccagtatgaccttgccgaaggcatcacctggatgaacggtctggaaatcaccgacggcacaggacagctctatctcacgggcctgctaactcctaactttgccgctcgcgcctggcaccataccggacgcgccgacgggctggacgtaccgggaagtgaaagtgggatgatggtgagcgccatgtatgaagcgttaaagggcgtttatctctccaccgcttacacctacgccaaacatcgccctgaccacgctgacgatgaaaccacctctttcatgcagtttggtatctggtacgaatacggcggcggacgtttcgccacggcttttgatagccgcttctacatgaaaaatgcctctcacgatcccagcgaccaaatcttcctgatgcaatatttctactggtaataaggactgtaatttcatgaaaataaaaactattttaacgccagtaacctgcgctctgctgataagtttttccgcccatgccgctaacgccgacaattataaaaacgtgattaaccgtactggcgcgccgcagtacatgaaggattacgattacgacgatcaccagcgttttaatccgtttttcgatctcggagcctggcatggtcatctgttgccagacggccctaacaccatgggcggctttccgggcgttgcgctgctgacggaagagtacatcaactttatggccagcaatttcgaccgcctgaccgtctggcaggacggcaagaaagtcgactttacgctggaggcatacagtattcccggtgcgctggtgcaaaaactgacagcaaaagatgtgcaagtcgaaatgactctgcgcttcgccacgccgcgcacgagtctactggaaaccaaaatcaccagcaataaaccgctggatctggtgtgggacggcgaactgctggaaaaactggaagcgaaagaagggaaaccgctttccgataaaaccattgctggcgaataccctgactatcagcgcaaaatcagcgccacccgtgatggcctgaaagtcacctttggcaaagtgcgcgccacctgggatctgctgacctccggcgaaagcgaatatcaggtgcataaatccctgccggtgcagactgaaatcaacggtaatcgctttaccagtaaggcgcatatcaacggtagcaccacgctctacaccacctattcccatctgctgaccgctcaggaagttagcaaagagcaaatgcagatccgcgatattctggcgcgtccggcgttttatctcaccgccagccagcaacgctgggaagaatacctgaagaaagggttaaccaatccggatgcgacgccggaacagacgcgcgtcgcggtgaaagcgatcgaaacgctcaacggtaactggcgcagtccgggcggtgcggtgaaatttaacaccgttacaccgagcgtgaccgggcgctggttctccggcaatcagacctggccgtgggatacctggaagcaggcgtttgcgatggcgcatttcaatccggacatcgccaaagagaatatccgcgcggtcttctcctggcagatccagcctggcgatagcgtgcgtccgcaggatgtgggctttgtccccgacctgatagcgtggaaccttagccccgagcgtggtggcgatggcggcaactggaacgaacgtaataccaaacccagccttgccgcctggagcgtgatggaagtgtataacgtcacccaagataaaacctgggtggcagagatgtacccgaaactggtggcctatcacgactggtggttacgtaaccgcgatcacaacggcaacggcgtgccggaatatggcgcgacccgcgacaaagcccacaacactgagagcggcgagatgctgtttacggtgaaaaaaggcgataaagaagagacgcagtctgggctgaacaactacgcccgcgtggtggagaaaggccagtacgacagtctggaaattccggcacaggttgctgcaagctgggaaagcgggcgtgatgatgccgccgtctttgggtttatcgacaaagaacagttggataaatatgtcgctaatggcggcaaacgtagcgactggacggtgaaattcgccgaaaaccgcagtcaggacggaacgttgctgggctacagcctattgcaggagagcgtggatcaggccagctatatgtacagcgataaccattatctggcggagatggcaaccatcctcggtaagccagaagaggccaaacgctatcgccagttggcacagcagctcgcggactacatcaacacctgtatgttcgacccgactacccagttctactatgacgtacgtattgaagataaaccactggcgaacggctgcgcgggcaaaccgattgttgagcgcggtaaagggccggaaggctggagcccgctgtttaacggtgcggcaacgcaggccaatgccgacgcggtggtgaaggtgatgctcgatcctaaagagttcaacacctttgtcccgctgggaacggcggcgttaaccaatccggcttttggcgctgatatctactggcgtgggcgcgtatgggtggatcagttctggtttggtctgaaagggatggagcgttacggttatcgtgatgatgccctgaagctggcggatacgttcttccggcacgccaaagggttaaccgccgatggaccaattcaggaaaattacaacccgctgacaggcgcacagcaaggcgcaccaaatttctcctggagtgccgcgcatttgtatatgttgtataacgattttttccgtaagcaataatttgcaactgctggcggatgcggcgtaaacgccttatccgccctacatgtgcaatcctcctggccggataaaacgcggcaagcgttgcatccggcaactgcaccgcgccactggcggatgcggcgtgaacgccttatccgccctacatgtgtgttcccgtaggtcggataagacgcgacaagcgtcgcatccggcatctgcaccgcgccactggcggatgcggcgtggacgccttatccgccctacatgtgcaattccgtaacctggataaaacgcgacaagcgtcgcatccggcgttatcaccgggcgtattctttttgaatcccatcacaaaccccgcactccccttttcccttttctccggcgacggctaaattagaactcatccgaccacataacaattattttacatactggacaattttatgagctacccgagcctgttcgccccgctggatttaggttttaccacgttaaaaaaccgcgtgttgatgggcagtatgcacaccgggctggaggaatacccggacggtgccgagcggctggcagcgttttatgccgaacgcgcccgtcacggcgtggcgctgattgtcagcggcggcattgcaccagatttaacaggcgttggcatggaaggtggcgcaatgctcaacgacgccagccagatcccacaccatcgcaccattaccgaagcggtacatcaggaaggcggcaaaatagccctgcaaattttgcataccgggcgctacagctaccaaccgcatctggtcgccccgtccgcattgcaggcccccatcaaccgtttcgtgccccatgagttaagccatgaagagatcctgcaactgatcgacaatttcgcccgctgcgcgcaactggcgcgggaggcaggatacgacggtgtagaggtgatgggttccgaagggtatttgatcaacgaatttctgacgctgcgcaccaatcagcgtagtgaccagtggggcggcgattaccgcaaccggatgcgatttgccgtagaagtagtgcgtgcggtgcgcgaacgcgtcggcaacgacttcattattatctaccgactgagcatgctcgacctggtcgaagacggcgggacttttgccgaaacggtagagctggcgcaggccattgaagcggcgggcgcgaccattatcaacaccggcattggctggcatgaagcacgtattccgaccattgccacgcccgtgccgcgcggcgcatttagctgggtcacgcgcaaactgaaaggccacgtcagcctgccgctggtaaccaccaaccggattaacgatccgcaggttgccgacgatattctcagccgcggcgatgccgatatggtaagcatggcgcgaccgtttcttgctgatgcggagctgctgagtaaagcgcaaagcggacgagccgatgagatcaacacttgtattggctgcaatcaggcctgtctcgatcaaatcttcgttggcaaagtcaccagctgcctggtgaatcctcgcgcctgccacgaaaccaaaatgccaatccttcccgccgtgcagaaaaaaaatctggcggtggtcggtgcgggacctgctgggctggcgtttgccattaacgcggcggcgcgtgggcatcaggtaacattgtttgacgctcatagcgagattggcgggcagtttaatatcgccaaacagatccccggcaaagaggagttttacgaaacgctgcgctattaccgccggatgatcgaagtgacgggcgtgacgctaaaactcaatcacaccgtgacggcggatcagttacaggctttcgatgaaacgatcctcgccagtgggatcgtgccgcgcactccgcccatcgacgggatcgatcatccgaaggtattgagttatctcgatgtactgcgcgacaaagcgccggttggcaacaaagttgccatcatcggttgtggcgggattggttttgatacggcgatgtatttaagtcagccgggcgaatccaccagccagaatatcgccgggttctgtaatgaatgggggatcgacagtagcctacaacaggctggtggcttaagcccgcagggaatgcagatcccccgtagcccacggcagattgtgatgctccagcgcaaagccagcaaaccaggacaggggttaggcaaaaccaccggctggatccatcgcaccaccctgctcagccggggtgtgaaaatgatcccaggcgtaagttatcagaagattgacgatgacgggctgcatgtggtgatcaacggcgaaacgcaggtattagcagtggacaatgtggtgatctgcgcagggcaagagccaaaccgcgcgctggcgcaaccgctgattgatagcgggaaaacggtgcatttaattggcggctgcgatgtggctatggagctggacgcacgacgggcaattgcccagggaacacggctggcgctggagatttaaatcgttatttgaagcgccggatgcaacgcatccggcacgtcgcgttaatcaataaacaaggcgggagaaatgccgaatcgcgttgccaattttttagcgtgttccagcgttaatttcctcttcccgctcaaaacgcgactcaccatagatttactgccaatttccggcagatcggaaagggttaaaccatattgatccataagggtacgaatcacggctataccgccaggcatggcttgagccatggcattaaattccgcaaattcgggcgcactttcttcccacgcggttattttggcacacaccagatccagcaaggggttttcaggatcgttgagcagcagatgatctaccagttccagcgcctgggtgtattgttcctcgttctgaatacccgccagaaaaggtgccacagcagttagcttttctcctgcttgcaagatgtcggcaatcgcaatcattttttccccttagtacgatgaacagcggtaaagaaatcgtattctttatgcgtcataacttcacgtatgtagcacttttggctttcaaaaaagaccattgctacaacacgtaattcattgcccccaacattgaaaacataatgcttatccagatatttgaagttatccagagatgggaatactgcttttaaactctcaggttttttgaaatatcccttagcaatcgtgttccccagagccaccaactccgttttatgttgcgggtatttttccgcagcatctttcaatgctttttgagttatcaggtgcattcttcatcacgtccgttgacaaattggcaatatgataacatccgttgccagattggcaacggatgaatttatctgtgtgacggaagaataaacgtagaaaaacgctaaacaagagaatgtagacgatggtgacagggattttttgttttatggaagcgcgattccagaactgggcagacattgccggatgcgacgcttgccgcgtcttatccggcctggagtaacgtgctgaacgtaggccggataaggcgtttacgccgcatccggcaggtaactcccaatcttaccgacgacgtcccagcttcaccgctttcagtaccacaaatttattattcgtcgcaatagtggtgcagttgccgaaaatcttcttcagtttatggaagtaatccaggtgacggttggcaacgatatacagctcgccgttgattttcaggcagcggcgggcgtggtggaacatctcccaggcgacgttatcggtcagcgcatgttgttggtgaaacggcgggttgcagagcacagcattaaagcggaaaggctccacgccggagagcgcgttgttgatcataaactcgcagcgatccaacgcctctggcatgttggtttcaacgttcaaacggctggaagcaaccgccatcgggctttcatcgacaaacaccactttcgcctgcgggtttttatcaagcagcgtcagaccaataacgccattaccgcaaccgagatcgacaatctccccttcgagattctctggcagatgttgcataaagaagcgcgcgccgatatcaagcccggtgcgggagaagacattcgcatggttgtggatagtccagtcagtaccttccagcttccagctaacggtctgcggcgcatcggccagctgcggttcattgaaagtgcaattaatcaggcgcgcttttttccatgccagcgtggtggtggttgggccgagcactttttcgaacagttccagcgtggaagtgtgaatgtcacgggccttggcaccggcaataatacgtgtatcgctcgtgaccactttgcgcagcgcacgcagttgctgttccagcaatgccagtgttttcggcactttgatcagcaccacacccggctgttgcgggtagtcggcggtgctgtcgagaaacttcacgctgctctcatcaatcccgttgaggcgtaaattctcgcgcgtcgccagttcactgatgtaactgtcgccaatgctgtacggcttatgttccgccagtgcgcagcttaacgcaccaaaggcatcattcaggatcaacaccgggccgcggatttctgtgtcgtccaactgttgcagcaaatattcatccgccgcttcccacgcctgtagcgggttaacgtcatccgtcgccggaaaacgttgtagtgtcagactacggaaaccgttgtctaagtggctcatcggccctcctgaatgataaaatttcgacattgcccctgaaaagggtgcgtgagtataccctttttctctttttcgtgggcggttatgagcaatcttacttatcttcagggttatcccgagcagctactttcccaggtgcgaacactgattaacgaacagcgtctgggcgatgtgctggcaaaacgctatccgggaacacacgactacgccaccgataaagccctctggcaatatactcaggatctgaaaaatcagtttctgcgtaatgccccgccgatcaataaagtgatgtatgacaataagatccatgtgctaaaaaacgcgctcgggttacataccgctgtttctcgtgtgcagggcggcaagctgaaagcaaaggtggagatccgcgtcgctaccgtgtttcgcaacgcgccggaaccgtttttgcgcatgatcgtggtgcacgagctggcgcacctgaaggagaaagagcataacaaagcgttttaccagttgtgttgtcatatggaaccccagtaccaccagcttgagttcgacacccgactgtggctaacgcagttgagccttgggcagaacaaaatctgaaaatgatgtcaggcgttatcttttctttctttagcgcctaaaatcgacctcccccctttcgttaaggataacgaccatgctgcgcgcatttgcccgccttcttctccgtatttgtttttctcgccggactctaaagattgcctgcttactgttacttgtggcaggagcgaccatccttatcgccgatcgcgtaatggtcaacgccagcaaacagctgacctggagcgatgtcaacgccgttccggcgcgtaacgtgggtttattgctgggggcgaggccgggtaatcgctactttacccgacgtattgataccgcagcagcgttgtaccacgccggaaaagtgaaatggctgctggtaagtggcgataacggacgtaaaaattacgatgaagcaagtggtatgcagcaggctttgatcgctaaaggcgtaccagcaaaagtgatcttctgcgactatgccggattcagtacgctggatagcgtagtgcgtgccaaaaaggtttttggtgaaaaccatatcaccattatcagccaagaatttcataatcaacgcgccatctggctggcaaaacagtacggcatcgacgctatcggttttaacgcgccagacctcaatatgaagcacggtttttatactcaactgcgggagaaactcgctcgtgtcagcgccgtgattgacgccaaaatcctccatcgccagccgaaatatctcgggcctagcgtcatgattgggccgtttagtgagcatggctgtccggcgcagaaataatgcgtatctgcgcacgtcgaagatgaaaaaggcgtgctacattgacgacagaatccctttatggagtatccacgcgttatgatacgtttcgctgtgattggtacgaactggatcactcgccagttcgtcgaggccgcccatgagagcggtaaatacaagttaaccgccgtatattcccgcagccttgaacaggcccagcacttcgccaatgatttttctgtcgagcatctgtttaccagcctggaagcgatggcggaaagcgatgccattgacgcggtgtatattgccagcccgaattccctgcatttttcccagacacaacttttccttagccataaaattaatgtgatttgcgagaaaccgctggcgagcaatctggcggaagtggatgccgccattgcctgtgcgcgggaaaatcaggtggtgctgtttgaggcatttaaaaccgcctgcctgccgaactttcatttgttgcgccaggcgctgccgaaagtcggcaaactgcggaaagtctttttcaactattgccagtattccagccggtatcaacgttacctggatggtgagaatcccaacacctttaatccggcattctctaacggtagtattatggatatcggtttttactgtctggcgagcgcggtggcgttatttggtgagccgaaaagcgtgcaggcaaccgccagtttgctggcaagcggcgttgacgcccagggcgtggtggtgatggattacggtgatttcagcgtcaccttgcagcacagtaaagtcagtgattctgtcctggcgagcgagattcagggcgaagcaggaagcctggtgattgaaaaactgtctgaatgccagaaagtgtgcttcgtgccgcgtggcagccaaatgcaggatctcacccagccgcagcatattaataccatgctctacgaagcagagctgttcgctaccctggtggatgagcatctggtggatcatccagggctggcggtcagtcgcatcaccgccaaactgctgaccgagatccgccgccagactggggtgatttttccggcagatagcgtaaaactataattgccaaagtaaaacagtgtaaaaggtatgtaacagaccattgactggctgaatggtctgtcatactttgttacctgcaaaggggagtaacttcattgccggtcgatcgtcattacgatgtgtgaaaaaacacatccggtcaccgggcaacccgaaaggaatacgcagacgtattccttttttgttgtaagtgagaccttgccggaaggcgaggtctatgcataaaaagcagcggctgacgtcttccgacgttggccgtttttttatgtgtaaggaacttctatgaatactgtcggcacgccgttgctatggggcggattcgctgttgttgtcgccattatgctggctatcgacctgttgttgcaggggcgtcgtggggcacatgccatgaccatgaaacaggctgcggcctggagcctggtctgggtgacgctgagcttactgtttaacgccgctttctggtggtatctggtgcaaaccgaaggtcgcgccgttgccgatccacaggcactggcctttctcacaggttatctgattgagaaaagcctggcggtcgataacgtctttgtctggctgatgttgttcagctatttctctgttccggcggcattacaacgccgcgtgctggtgtatggcgtgctcggggcgattgttctgcgtaccatcatgatcttcactggcagctggctaattagccagttcgactggatcctgtatatcttcggtgccttcctgctgtttaccggcgtgaagatggcgctcgcccatgaagatgaaagtggcattggcgacaagccgctggtgcgctggctacgcggtcatttgcgcatgaccgacaccatcgacaacgagcatttctttgtgcgtaagaatggattgctgtacgccacaccgctgatgctggtactgattctggtggaattgagcgacgtgattttcgccgtggatagcattccggctatcttcgccgtgaccactgacccgttcattgtgctgaccagtaacctgtttgcgatcctcggcctgcgtgcgatgtatttcctgctggcgggcgtagcagagcgtttcagcatgctcaaatatggcctggcggtgattctggtgtttatcggtatcaagatgctgattgtcgacttctaccatattccaatcgccgtcagcctgggcgtggtgtttggcattctggtgatgacgtttattatcaacgcctgggtgaattatcggcatgataagcagcggggtggataatttttaatctgcctaagccgtgtaccctgtcattaacatgagcaccgttttctccctctcccttccagggagagggtcggggtgagggtaatttttcgcaccgatgctggcctgttcccctcaccctaaccctctccccaaacggggcgaggggactgaccgagtccttttttgatgttgtcatcagtctggaagccgcacgttggctttatttttatgtcaaagaaatgtaaccattaagtttcaaaatatgacctctctttaaaatccagcatttttcgcttcccgaagctgtaactttccttatactcgaccttgcaaacactttgttacatcctgaaagatgcgtcgacagaacgcaccagggatgtgcgacaacacaatgaaaggatcgaaaaatgactacgcaacgtagtccggggctattccggcgtctggctcatggcagcctggtaaaacaaatcctggtcggccttgttctggggattcttctggcatggatcagtaaacccgcggcggaagctgttggtctgttaggtactttgttcgtcggcgcactgaaagccgttgcccccatcctggtgttgatgctggtgatggcatctattgctaaccaccagcacgggcagaaaaccaatatccgccctattttgttcctctatctactgggcaccttctctgctgctctggccgcagtagtcttcagctttgccttcccttctaccctgcatttatccagtagcgcgggtgatattagcccgccgagtggcattgtcgaagtgatgcgcgggctggtaatgagcatggtttccaaccccatcgacgcgctgctgaaaggtaactacatcgggattctggtgtgggcgatcggcctcggcttcgcactgcgtcacggtaacgagaccaccaaaaacctggttaacgatatgagcaatgccgttacctttatggtgaaactggtcattcgcttcgcaccgattggtatttttgggctggtttcttctaccctggcaaccaccggtttctccacactgtggggctacgcgcaactgctggtcgtgctggttggctgtatgttactggtggcgctggtggttaacccattgctggtgtggtggaaaattcgtcgtaacccgttcccgctggtgctgctgtgcctgcgcgaaagcggtgtgtatgccttcttcacccgcagctctgcagcgaacattccggtgaatatggcgctgtgtgaaaagctgaatctggatcgcgatacctattccgtttctattccgctgggagccaccatcaatatggcgggcgcagcaatcactattaccgtgttgacgctggctgcggttaatacgctgggtattccggtcgatctgcccacggcgctgctgttgagcgtggtggcttctctgtgtgcctgtggcgcatccggcgtggcgggggggtctctgctgctgatcccactggcctgtaatatgttcggtattagcaacgatatcgccatgcaggtggttgccgtcggctttatcatcggcgtattgcaggactcttgcgaaaccgcgctgaactctagtactgacgtgctgttcactgcggcagcttgccaggcagaagacgatcgtctggcaaatagcgccctgcgtaattaattgtttaacccctttcgtctacggcggaaggggttttctcaactttaaacggatcaattccccttttctgcatccgccagaaacgaatgatattcaggccattcataagcagaaaactaccctcaatcatcgtgccgcctatgctccccgcccagaagttgtgaatcacccagcaacacgtactaaaccacattacgcagcgcatggtcagccctttacagcagaatagcgcccaggtactgacaatcgtgccgataaccggcaatagttcgacaggatgatggaacttcgcgaggccaattccgccagtcagcacaataaaaatcgccattacccataagctgcgcgtgcgtaaggtaatcaatgtacgaatggcattaaggatggcactggcaccagcgggataggtgcccagaagaaaaaaatgtacgccaataacggcgctatagacgctaagctgctttttgaagcgacgttcgtcacgattgaaaaatgttgtgataccaatcagaaaggcgatgacacccacgccctgggccagccaatacgcggtcatgataaatccttagcaggtatggaaaagcaaacggcgcttcacattatgaaacgccgttttttattaacaactcatttcgactttatagcgttacgccgcttttgaagatcgccagttcgcggaagtcgttacgctcgttacaggtttgcttaccgttggcaaactcaacgatggtgtcgataaattcttccagcaactgcggcatcgctttaccgtggatcaactgacccgcgtcaaagtcgatccagtgttttttcttcgccgccagttcactgttggtggcgattttcaccgtcggcacaaatccaccatacggcgtgccacgaccagtactgaacagcaccatatggcagcccgcacccgccagggcgctggtcgctacggcatcgttacccggcgcacttaacaagttcagccctggcgttttcagacgctcgccgtaacgcagcacgtcaaccacgacgctggaacccgctttctgggtacagccaagacttttgtcttccagcgtggtgataccgcccgctttgttccccgggcttgggttttcatagatcggctgatcatgggcaataaagtactgtttgaagtcgttgaccatggtgaccagtttttcaaacgttgcttcgtcgcggcaatggtccatcagcaactgctctgcgccaaacatctccggcacttcggtcagtacggtagtaccgccgttagcaatcacgtagtcagagaaacgccccagcatcgggttagcagtaataccagaaagaccgtcagaaccaccgcactccagaccaaacttcagttcgctgagtttgcctggctcgcgtttatcgttgcgcatcacgttatacagctgatgcaaatgctcgattccggcttcgatctcatcatcctgctgttggcagatcatgaaatgaacgcgttcaggatcgatatcgcccagcgtttcacggaatgcggcaacctggttgttttcacagcccagaccaatcaccagcactgcgcctgcgttcgggtggcgcaccatgttttgcagcatggtgcgggtattaatgtgatcgtcgcccagctgactgcagccgtaggtgtggctgaagaggaacacgccgtcagtaccttcggcgttgttggtctctttcagaaaacggttctggatctgccgcgcgatgccgttgacacagcccacggttggcaggatccacagctcattacgcaccccgacatcgccgttagcgcgacgatagatctgcacttcacgatctgccgcttgcgcaggcagatcctgaaaatcaggttgatagcgatactgatccagatcgctcagattcgtgcgcgtattgtgggcgtgaacgtgaacacctgccgcaatatccgccaatgcataaccaatcggcaggccatatttgatgacattggccccttttgcgatatccgttaacgcaaatttatgtccacgagcaacatcctggcgcagcgtaacagtctggttatcgacactgacttctgtgccttcagccaaatctgctaaagcgaccgcgacgttatccagcgcatggatcttgatgtattgcatatcaaccccagaccttagttcagttcaatggcgaagtagtcacgcgcattgttaaagcaaatatttttcaccatctcgcccagcaggttgatgtccgccggtgcttcgcccgcttccacccagcgaccgatcatctggcacagaatgcggcggaagtattcgtgacgggtgtaactcaggaagctacggctgtcagtcagcataccgacaaagcggctcagcagaccgagctgcgccagttgggtcatctgacgttccataccgtctttctgatcgttaaaccaccagccggaaccgaactgcattttgcccggcataccttcgccctggaagttaccgatcatggtgcccagcacttcgttatcgcgcgggttcaggcagtacagaatggttttcggcagcaggttttcttcattctgcttgctcagcaacttagacagctcttccgccatcggacggtcgttgatggagtcaaagcctacatccggccccagcagtttgaactgacgcaggttgttattacgcagcgcgccaatgtggtactgctgtacccagccgcgacgtgcatattcggcaccaaggaacaccagtaccgcagttttgaactgcgccacttcgtgctcgctcagggtttcgccagccagacggcgcgccagaatgctgtccagttccgcttcgttcgcttcagcaaacatcaccacatccagcgcgtggtcagacactttacagccgtgagcggcgaagtgatccagacgtttggtcagggcagtttgcaggtcagcaaagcggcgaatgtcggtatcggaaacttcgcccagcttcgccatgtagtcgttaaaggtcgcctgttcgatgttgaaggctttgtccggacgccagctcggcagcactttgatggtgaaagagccgtctttggcgatctctgcgtgatgctccagagaatcgatcgggtcatcggtggtgccgaccattttcacgttcatctgctgcatgatgccgcgcgcggagaagttatcctgcgccagcagttcgttacattcgttccagatttcatcggcagtactcggagaaagcaatttgccagtgataccaaacggacggcgcagttcgaggtgcgtccagtggtataacgggttgccgatagtgtgcggaacagtcgccgcccaggcgtcaaatttttcacggtcagacgcatcaccggtacacagacgctcggccacaccgttggtacgcatagcgcgccatttgtagtgatcgcctttcagccagatgtcatacaggtttttaaaacgatagtcttccgcaatctgctgcggcggcaaatggcaatggtaatcgaaaatcggctggtcttttgcgtagtcgtgatacagacggcgggcaaattcggtatctaacaggaaatcttcagtcataaacggagtcattttcgtcttcctctcaacgagtgagctagcttgcttatggtgcgatgctgacaaagttatcacaccaatttccagagtccgaagatattttcgtgagttagatcaataaacgtagttaaaaaaattactctcaaagtggtaaatctcgctgcaggccgcgccagtactggccttgctgtcgtcaggtaatgtccctacaaatattcccacatttgtgatggctctcaccttttaaagttgtatgacaagttatctttctgccgtcgcaaatcataagtcgacggaatgcaaattgccgattcattcatttgttagatgaatcgggttaaccggtacggaagccgaattagcacgaaactttcatggcaacgttcggggcgtgccggttttttttcggttacccggtcgtaactaacatcttcagcctctggcgggatgatggccgcgcttcctgcggatataacaaaacgatgaggttttacatgcgtaaaattaaagggttacgttggtatatgatcgcactggtgacgctcggcaccgtgcttggttacctgacgcgtaacactgtggcggcagctgcgccaactctgatggaagagttaaacatctccacccaacagtattcctatatcatcgcagcctattctgctgcttatacggtcatgcaaccggtagcaggttatgtactggatgtgctgggtacgaaaatcggttatgcaatgtttgctgtgctgtgggccgtgttctgtggtgcaaccgcgctggcaggtagctggggtggcctggctgttgctcgtggtgcggtcggtgccgcggaagcagcgatgatcccggcgggtctgaaagccagctccgaatggttcccggcgaaagagcgttccatcgcagtaggctactttaacgtaggttctagcattggtgcgatgattgcgccgccgctggtggtatgggcaatcgtaatgcacagctggcagatggcatttatcatctccggtgcattgagctttatctgggcgatggcatggctgattttctataaacatccgcgcgaccagaagcatctgaccgatgaagaacgcgactatattattaatggtcaggaagcccagcaccaggtgagcacggcgaagaaaatgtccgttggtcagatcctgcgtaaccgtcagttctggggtatcgcgctgccgcgtttcctggcagaaccggcctggggtacttttaacgcgtggatcccgctgttcatgtttaaagtttacggctttaacctgaaagagatcgcgatgttcgcctggatgccgatgctgtttgctgacctcggttgtatcctcggtggttacctgccgccgctgttccagcgttggtttggtgtgaacctgatcgtttcccgtaagatggtcgtaacgctgggtgcagtgctgatgattggcccgggtatgatcggcctgttcaccaacccgtatgtcgcaattatgctgctgtgtatcggtggttttgcccaccaggcactgtctggcgcgctgattacgctctcttccgatgtgtttggtcgtaacgaagtggcaacggcaaacggtttaaccgggatgtccgcatggctggcaagtacgctgtttgcgctggttgtcggtgcactggctgacaccatcggcttcagcccgctgttcgcagttctggcagtgttcgacctgttaggtgcgctggttatctggaccgtgttgcagaacaaaccggcgattgaggtggcgcaggaaacacataacgatcccgcaccgcaacattaacgtttcgtgtaagttttagtttcccttcaaagccgccttctcaggcggctttttcatcactgcgagtagagctaaactcgcaaaagtggtataacaaatatagtctgccgtatcatgcctggagcgcatatggaaatcactgaaccacgccgtttgtatcaacaacttgccgctgacctgaaagagcgcatcgaacagggcgtctatctggtgggtgataaactgcctgcagaacgctttattgccgatgaaaagaacgtcagccgtacggtagttcgtgaagccatcatcatgctggaagttgaaggctatgtcgaagtgcgtaaaggtagtggtattcatgtggtttccaaccagccgcgccatcagcaggcggctgacaataatatggaattcgccaattacggtccgtttgagttgcttcaggctcgccagctcatcgaaagtaatattgccgaattcgcggcaactcaggtaacgaaacaggacatcatgaaactgatggccattcaggaacaggcgcgcggcgaacaatgcttccgtgattccgagtgggatttgcagttccacattcaggtcgctctggcgacgcagaactccgccctggcggctatcgtggaaaaaatgtggacccagcgtagtcataacccgtactggaaaaaactgcacgaacacattgattcccgtaccgtcgataactggtgtgatgaccacgatcaaatcctcaaggcgctgattcgcaaagatcctcatgctgctaagctggcaatgtggcagcatctggaaaacaccaagatcatgttatttaacgaaaccagcgacgacttcgagttcaatgccgaccgctatctattcgccgaaaacccggtggtgcatctcgatacagccaccagcggcagtaaatgaaattcctgtccgacaggcgctgcaatgcgcctgtttgtctcgtcggtaagcgaaaagtataaagtgtcagcctgtgtaaatcctctcgccaccctcccctgcattcagcaaaatcagactccacggacatgtaattttgataacgaacaacgttgacctttgttacaattagattcaatttgaatttatgtttttgaatgctttcttatctcacgatttaacagggaatagttcaggctgtgttgatgtatcaaacccgcagaacataccaaaacagcaataacattgcggtagtgcatcttttaaaaccagcgtggcgttaaccgattcaccaggaataatgaatggaacttttgacccaattgctgcaagccctgtgggcgcaggattttgaaaccctggccaatccaagcatgattggcatgttgtattttgtcttgtttgtaattttgttccttgaaaacggcttgcttccggcggcctttttaccgggcgacagtttactggtattggtcggcgtgttgattgcgaaaggcgcgatgggctatccgcaaacgattctgctgctgaccgttgccgccagcctcggctgctgggtcagctatattcaggggcgatggctgggcaatacccgcaccgtacaaaactggctatctcatttacccgcgcattatcatcaacgcgcacaccatctttttcataaacacggtttaagcgcgctgttaattggtcgctttattgcgtttgtcagaacactgctgccgacgattgccgggttaagtgggctgaataacgcgcgctttcagtttttcaactggatgagcggtctgctgtgggtattgatcctgacaactctgggttacatgctcggcaaaacgccggtatttttaaagtacgaggaccagctgatgagttgcctgatgctgctcccggtggtgctgctggtgtttggcctggcaggttctctggtcgtgttatggaaaaagaaatatggaaatcgggggtaagggatgcaaatacctcgcatgagccttcgccagctagcctggtccggcgctgttttacttctggtcggcacgctgttgctggcctggtccgcggttcgccagcaagagtctacgctggcgattcgtgccgttcatcaaggcacaacgatgccagacggttttagtatctggcatcaccttgacgctcatggcattcctttcaaaagtatcacccccaaaaacgacactctgttaattacatttgactccagcgaccagagcgccgccgcaaaagcggtcctcgacagaacattgccccatggctacatcattgcgcagcaggacaataacagtcaggctatgcagtggctgacccggttacgggataactctcatcgcttcggataacttcctgttatccgaaacatatcactcactttggtgatttcaccgtaactgtctatgattaatgaggcggtggttaacactaccgcttcgttgtctggacaatcgttcctttgtaataggtccgaatcacaatggaaggttcaagaatgaaataccgcatcgctttagctgtttctctctttgctcttagtgccggtagttatgccactaccctgtgtcaggaaaaggagcaaaatatccttaaggagatcagctatgccgaaaaacaccaaaaccagaatcgtattgacggtctgaataaagccctgagtgaagtccgggccaactgtagtgatagccagctgcgtgccgatcatcagaagaaaatcgcaaagcagaaagatgaggtggcggaacgccagcaagatttagccgaggcgaagcaaaaaggcgatgccgataagattgccaaacgcgaacggaaactggcagaagcgcaggaagagctgaaaaagctggaagcgcgcgactactaactcacaatagtcactacttactcacctggagaaaactatgagcaaagaacacactacggaacatctgcgtgctgagttgaaatccctttccgatacgctggaagaggtgcttagcagttctggcgagaagagcaaagaagagttgagtaagattcgtagcaaagcggagcaggcactgaaacagagccgttatcgcctgggtgaaaccggtgatgccattgccaaacaaacccgtgtcgcggcggcgcgtgccgatgagtatgtgcgcgaaaatccgtggacgggcgtgggcattggcgctgcaatcggtgtagtgctcggcgttctgctgagccgtcgttaattatggcggacactcatcacgcacaagggcccggtaaaagcgttctgggcatcgggcagcgaattgtttctatcatggttgaaatggtagagacacgtctgcggctggcggtggtggagctggaagaggaaaaagcgaatctctttcaacttttactgatgctgggcctgacgatgcttttcgctgcatttggtcttatgagcctgatggtgctaattatttgggcggttgacccgcaatatcgcctgaatgcgatgattgccaccaccgtggtgttgctgctactggcactgattggcggtatctggacgctacgtaaaagccgtaagtctacgttgctgcgccatacacgccatgagttagcaaacgatcggcagctgctcgaggaggagtcccgtgagcagtaaagtcgaacgtgaacgacgtaaggcgcaactgcttagccagatccagcaacaacggctggatctttccgccagtcgtcgtgaatggctggagacaacaggcgcttacgatcgtcgctggaatatgctgctaagtctgcgctcctgggcgctggttggcagtagcgtgatggcgatctggacgattcgccatcctaatatgctggtccgctgggccagacgcggttttggcgtatggagcgcctggcgtctggttaaaacgaccctcaagcagcaacagcttcgcggttaacttccctctggccggagccattccggccttatccctcaaattttttgaagatttttgacagttttccttgctaacaatcatcattcaccacgtttatgattctctccatcgacagcaacgacgctaataccgcgccattgcacaaaaaaacaatcagcagcctgagtggcgcagtggagagtatgatgaaaaaattagaagatgttggtgtactggtagcgcgcattttaatgccgattctgtttattaccgctggctggggaaaaattactggctacgcgggtacccaacaatatatggaagcaatgggcgtcccgggttttatgctgccactggtgattctgcttgagtttggtggtggtctggcaatcctgttcggtttcctgactcgcaccacagccctgtttactgcgggctttacgctgctgacggcatttttatttcacagcaactttgctgaaggcgtcaacagcctgatgttcatgaaaaacctgacaatttctggcggattcctgctgctggcaattaccggtccgggcgcgtatagcatcgaccgcctgctgaataaaaagtggtaagcacgcgctatacttaacgataaaaaacgaggaggaagctcctcgtttttgctattggaggagagaaaaatgggtcaactgattgacggcgtctggcatgacacctggtacgataccaaatctaccggcggtaaatttcaacgtagtgcttccgcatttcgtaactggctcactgccgatggcgctcctggccccactggcacaggcggttttatcgcagagaaagatcgttatcatctctatgttagtctcgcctgcccgtgggcgcaccgcacgctgatcatgcgcaaactcaaaggactggaaccgtttatttccgtttccgtagtgaacccgctgatgctggaaaacggttggacctttgatgacagttttccgggagcaaccggagacacgctctatcaaaatgaatttctgtatcagctttatctccacgccgatccacactacagcggacgagttactgttcccgtgctgtgggacaaaaagaaccacaccatcgtcagcaacgaaagtgcagaaatcatccgcatgttcaataccgcgtttgatgcgctgggcgcgaaagcgggtgattactaccctccagccctgcaaacaaaaattgacgaacttaacggctggatttatgacaccgttaacaacggcgtgtataaagctggttttgccaccagccaggaagcttacgacgaggcggtggcgaaagtgtttgaaagcctggcacgactggagcagattttaggccagcatcgttacctgaccggcaaccagctaaccgaagccgatattcgcctgtggactacgctggtgcgttttgatccggtgtatgtgacccacttcaagtgtgataagcaccgcatcagcgattacctgaatctgtacggttttctgcgcgatatctaccagatgccggggatcgccgaaacagtcaatttcgatcatatccgtaatcattacttccgcagccataagaccatcaaccctacggggattattagtattggtccgtggcaggatctcgatgaaccgcatggacgagatgttcgcttcggttaaaaaaaggcaccttacgaggtgcctctgataattagctaagtgcatgttgttcatgtcggatgtggcatgaacgccttatctgacatacaaaacattgtacattcaatagattgcataacccgcgcagaccagataagcgtagcgcatctggcgattttgcgcttgtcatcagtcttagcgcgccttcacggcactttattaattccttgaacgaatatttactgccatttcattcacgtctattcttaatttgctgctttaaaaacaagtgattgagcaaaattgaggcaaaaatggactggtatctgaaagtactaaaaaattatgtcggtttccggggtcgtgcgcggcgcaaagagtactggatgtttattctggtcaacatcatctttacgttcgtgctggggctgctggataaaatgttaggctggcaacgcgctggtggcgaaggcatcctgacgacaatctacggtattctggtgtttttaccgtggtgggcggttcagttccgccgcctgcacgacaccgaccgcagcgcgtggtgggcactgctattcttaatcccgtttatcggctggcttattatcatcgtctttaactgccaggcgggtacgccaggcgaaaaccgctttggaccagatccaaaactggaaccttaaaacaaatctgctcgccggatgtctgactcatccggcttttatcattatgttgatgaatgaataatttactaatgtttatttaaaatatttcaatgtcgttatataaattacctataaaaaataaccatgtatttatcttaaatatcaaaacctttataacatccgaaaaagaaagatacgaatagcatttacacaatacccggaatagactttcgtcacttttaattaaagggatgtttttatgcagtggtatttgtccgtattaaaaaattatgttggtttctctggtcgcgcacgtcgtaaagagtactggatgtttactctgattaacgccatcgtcggcgctattatcaatgtcattcaattgattttaggtctggagcttccatatctgtctatgctttatttgctggcaaccttccttcccgtccttgcgcttgctatccgtcgcttacacgataccgaccgtagtggtgcctgggccttgctcttttttgttccgtttattggctggctcgtgcttctggtttttttctgcacagaaggtacttctggcagcaatcgttacggaaacgatccgaagtttggtagtaattaatcttagaattggggcgatatttcgcccctttttattaacaataataaatattattttccgttaaaaagtttgggaatttcccgcagacaccaggatttcgcttcccccatactgtcacgacgccaggccataataatatcgatctcgctggtgctttccgggctgacgacacgcaaccgcccttccgcaatatctttttcgaccataggatacggcatcgtcgccacgccaagccccgccagtaatgcctgacgtttatcttcaatcgtgctcaccgttaagcgcggctgtttgtccagcagctgtacggtcaacaccgggcgctcacgagcggtatccgccaccgcaattccacgatatttcacacgcgtcacttcagataacggttccggctcctgatgaatcgggtgatcaggcgcggcaacgtagacgttcattaacgtatagagcttgcggctgttgatctcgctgctggaacgaaaatgcatatccggcgcgataacaatatccgcccgcccctgctccagccgttcccacgcccccgccagcacttctgtgatgattgccagttgggtattggcttttgccgccagtttgtcgattaacgggaaaaaggcaggtgtcggtaccagcgcttcggtcacaatggtgagatgcgtttcccaaccgcgcgcgagagcttccgcatcagtagtcagtttatctgcggcttccagcaaaacgcgccctcgctccaacaacatcctcccgacattggtgaatttggtacgatggccgctgcggtcaaacagcaccacatccagctcttcttccagtttttgcatggtgtagctaagtgcggaaggcacgcgtcccagctcatccgccgccgccgcaaaactgccccggcgatcgatcgcatccataacccgtagtgcttccagcgttaatgccctttctttggccatttcgttctcattcaggaaatttgaacataccgggcagaatatctggctaacaatgtagcgtccagccccttaccataaaaggaagtaaagagaggtcaagaattatgattactacccgaactgccaggcagtgtggacaagcagactacggatggttgcaggcccggtatactttttcctttggacactacttcgacccgaaattgttaggctatgcctccctgcgtgtgcttaaccaggaagtgctggccccaggtgccgcctttcagccgcgaacctatcccaaagtcgatattttaaatgtgattctggatggagaagcagagtatcgcgatagcgaaggcaatcatgttcaggccagcgccggagaggcgttgctgctctctacccagccgggtgtcagctatagcgaacacaatctcagcaaagacaaaccgttaacgcgaatgcagctttggctggacgcctgcccgcagcgagagaatccgctgattcaaaagctggcgcttaatatgggcaagcagcaattaatcgccagcccagagggtgcgatgggaagcctgcaattacgccagcaagtgtggctgcaccatatcgtgctcgacaaaggcgaaagtgcgaatttccagttgcatgggccacgcgcgtatttgcaaagcattcacgggaaatttcatgcgcttacgcatcatgaagagaaagcggcgctgacctgcggtgatggggcgtttattcgtgacgaggctaacattacgctggttgccgattccccactgcgcgctttgctgatagatttgcctgtctaattgtttttacagggagatgatgatgagtaaaaaattggccaaaaagcgccagccggtgaagcccgtggtggcgaaagaacctgctcgcaccgccaaaaattttggctatgaagagatgttgagcgagctggaagctatcgtcgcggatgctgaaacgcgtttagccgaggatgaagctaccgcgtaaagacaggttgccggatgcggcgaaaacgccttatccggcctacaaaatccaacaacattaacgaattaaacaacccgtaggccggacaagatgcgccagcatcgcatccggcacgatccccaaaacctggcgtttatctggccttgctcgccataatctcgataatctgccgatccgtttgctgcatgctatggcttgctaacgcacacaggttggcaatgctctgctcaacatcatgcgccacaatcccttcattgccggtcacggcggtatcatccagcgccattaacaccgctttccacgcagcgctagcactggtgctaaccttcatcgcgcagctgttgctcgcaccatcgcaaatcatgccgctgacatcgccgatcatactgctgatcgccatgctgatggtttcataacgcccatccaccagccatgccatcccggcggcggcccccattgctgcggtcgttgcggcacacagcgcagacaaacgcggtaactggttatggatgtaaattgcgctcaaatggctaagcatcagcgcacgcgccagccgttcatcatccgctccgaagtgttctgctaccaccaccacaggcattgttgcggtaatcccctggttaccgctgccggagttactcatagccggaagcgtagcgccgcccatacgcgcatcggatgccgcgctggtacgaatcacaatggaactagagagatctttcgccagcaaaccgcgctcgcactgtttttccagcgtcgcgccaatatgcagcccccacttaccgctcaaaccttcctggcttaacgcacaatttagcttcgcggaatcgagaataaagcggatcgccgcaaacgggacttcattgacgaacttcaggatctcagccagcgtcgttctggaaagcaccgtcagcggagactcttgctcgccctctgccacacacgcctgctgggtaaacaccacaccatcgtgcgtctcgatatgcacaatgttggtatgcccgccgacgatggtgacacacgcccacttctcaccgttccagactttggcgcgactgaagaggatttcatcgcaaggttcctggatcttaacggagactttccccgccgccagcagtgctttggcatcggcaattgcctgcgctgttgcgtctttcagcacttccagcccggcgttggcatttccacctaacgcccccagcgccgccgcaatcggcagccccaccattcccgtgccgggaacggtgacgcccagaccgttcttcatcagatttgggctaacccaggcttctacacgttcaaccggaccttccagttctgccgcagcaaccgccgccgccagcgccagactaatcggttcagtacatcccagcgccggttttacttcctcctgaacggcgaggatgtaacgctgccataacggatttaaagtgctatcaaacatattaaaaaccttaaaatttcaggtaaatcaagaaaatgccaggaacggagaaacacacagcaacaaaccagtgacgataatcaggtacagagacatccctttgtatttgtgcaatgctggtactttgtaaaccagccacgccgggatcaggcaccctaccatgccgaaaatcgggctacagatagaggtgaagctcaacaccggtgcgttcagtacgatggcgctccaggccagcaaaatggcgaaaatcatgatgccgcgctgaacgagattttcgttaatcttctcggcaggcatcttgcgacgcaggatgttcattacgatcccttgcgttgcttcgcgaaagcctaaatagacgccaaagaatgcagtcatgacagcaaagatattgagaatgacgctgaccactttcacccacgctgcgccgtcaccgctaataaactgtgcggcaatcgccagcgcggaaatattctgctcataggcttttaccgcttcgtcatgtcccatcgccagcgtgaagctcacggcgtagaaaaagacggtgacaaacaaaatgccaaacgcgatattcattgcccgcaatgctttatgccgcgccacttcaatacttttttcccggctgcgataagagatcaccatcggacttaacgtctggataaacagaatgctcgtcagggtaaacggcagcgtaataatggcgtttttcaccagcagccccagcggcggtaggctaccgacgttatacagatgccacattcccaccatgctcacgcccagcgccgcgaccaccagcagcttggtcagcaccatgccggtgctaattttgaataacaatttctcgccgcgactggagatcgccaccagaatgcaaatcagtaccagaccataaaagggactgtcactcagcaacccttccgtcacgccgaaggtatgcaggtaggaagcactatcgttggtgatggcggtggaatagacgaacatccaaatcaccagcattacgaaatagagcgcacctaacaggatgccccagtttttacctaaataaccgctaatgacgctcgggtaatctttacattctggactttctgccagcgtattaataaacaatcgctgaaacagatacattgccgggtaaccaatcacgctactgagcaaaaatacccacaatcccatcaaaccgacctgcaccgggagaaaaacaatccccgcgccaatcgccatcccgatactcataatcacccagccggtgtcagtactgtcgaatttgatcgcttctcgccactcgctctcactcattccagcacgacccgccggggtcgaagcgtctgcaatgacgcctttattcgatgcaatttccataatttctcgctcaatattttgtagggcttattatttttttccgagccgcatcaaggcgatatgcggtctacgtttttgcaggcgagttattagaataaagaaatgatacgcgcgaggtcagagaaaatcttcacaatcaagactttgaaataacggagatggataagaattttctactaaattaatcgcaggagaatattcattctctatttgcggcagatcacaaaaaaaaggtgcacatttgtgcacccaaggatgaaagctgacagcaatgtcagccgcagaccactttaatggccagtcctccgcgacttgtttcgcggtatttatcgttcatatctttgccggtttcatacatcgtctcgatcactttatcgagactaacacgcggtgcgctggtgcggcgcatcgccatccgcgcggcgtttactgctttcacggcattaatggcattacgttcaatgcacgggatttgtacctgtccggcaaccggatcgcaggtcagcccaaggttatgctccatcgcgatttccgccgcattgcatacctgcgccggactgccgcccagtagttcagttaaccctgccgccgccatactacaggccacgccaatctccccctgacagccgacttccgcgccagagatggaggcgttcattttatacagcgcgccaatagcccccgcggccagaaaatagcgggcaatactccgctcgtttaccggacgacggaacttatcgtaataagccagtactgccggaataatgccgcacgcaccgttagtcggtgccgttaccacgcgcccgccagctgcgttttcttcactaaccgccagcgcgtacatgttgatccagtcgatgacattcatcggatcgttagagatgttatcgctggaaaccagctgacgacgcagcgctacggcacggcgcggcacattgagcggaccaggcagcacgccttcagtgttcatcccacgttcaataccgtcatgcatcacttgccagatacgggcaaaaccggcgtcaatttccgctttgctgcgcagcgctagctcgttgtgcatcatcagaccagatatagacaggccgttgtaatcacacattttcagcagttcacctgcactgtggaaatcgtaaggtacggacgtttcgacatcgtggctcaggccgaagtgttcttcttcgacaataaacccgccgccgacagagtaataggttttacttaatagctcttcctgtcccttccaggcagtgatccgcattccgttctcatggcgaggcaacatttcgggatggaagataatgttctttgctacaggaaaatcaacaatatgcgcaccagatgccactggcagccgcccgctgcgcgttactaactctataaatgcagggatctcatcaatgacaacatcctgcggactgtttcctgccagtcccatgatgatggcgacatccgtggcatggcctttgcccgtcagactcaagctcccgtacagatcgaccacaatatggctcgtcgcggttaataagccgctactttccagccgatcaataaaactttttccggcattcattggccccacggtatggctactggagggaccaatcccaattttgaaaatatcgaatgcactaatcatatccacaccctcggattgccgttcagtgaagtggagcggaacgaccttacgaccgtcccgctcacgaggctttacgcactacgtactgcgatggcttcaatttccagcttcacatctttcggcaaacgcgcgacctgcacacagctccgggtcggataggtcgcctgatgctcatcgaagaactgcttatagacttcgttgatggtggcaaaatcattcagatcggtgataaacacggtcatcttgatgatatcgcccacgctcagcccggcagcaaccacgatcgctttgacgttttcgaggcttaaacgcgcctgatcttgcacatcagccgggatctcaccggtctgtgggcaaaccggtatttgcccggaggtgaagaccatgctgcctaaatcaacgccctgaacataagggccgattgcgcctggggcacgttgcgtttcgataatctttttcatacatcctccggcgtcagagcgcctgggtaaaggtacgactaataacatcctgttgctgttcacgggtcagtgcgttgaagcgcacggcgtagccagagacacggattgtcaggttaggatatttttccgggtgctcgatggcatccagcagcatttcccgattcattacgttgacgttgaggtgttgaccgccttcgacatccgcttcgtggtggaaatacccatccagcaggccgacaaggttggttttacgtactggatcttctttgcccagcgccgcaggaacgatactgaaggtgtagctgatcccatctttggcgtaggtgaacggcagtttcgccacgctcgtcaaactggccacggcacctttgcggtcacgaccatgcatcgggttagcgcccggcgcgaacggtgttccggcgcgacgaccgtccggcgtattaccggttttctggccgtacaccacgttagaagtgatagtcagaatgctctgggtagggacggcgttgcgataggttggcagcgctttaattttcttcataaagcgttcaaccaggtcgcaggcaatgctgtctacgcgctcgtcgttgttgccgtactgcggatattcaccgtcgatttcaaagtccaccgccaggccgttttcgtcacggattggtttcacgcgggcatatttgatggcagacagggagtccgtcgccacgctcaggcccgcgatgccgcatgccatagtgcgatagacatcacgatcgtgcagcgccatcaggctagcttcgtagctgtacttgtcgtgcatgtagtgaatgatattcagcgcgctgatgtactgcaccgccagccagtccatgaagtgatcgaggctgtccatcactttgtcgtaatccagcacgtcgtccatcagcggtgctgttttcggcccgacctgaatcttcagcttctcgtccaccccgccgttaattgcgtagagcagcgttttcgccaggttagcgcgtgcaccaaagaactgcatttgcttaccaatcaccattgggctgacgcagcaggcaatcgcgtaatcgtcgctgttgaagtcagtacgcatcagatcgtcattttcatactgcaaggaagaggtgacgatgctcacctgcgcggcatattttttgaaggcaatcggtaattcttcgctccaaagaatggtcaggttaggttccggtgccggccccatagtgtgcagggtgtgcaaatagcggaaggagtttttggtcaccagcgtacgaccgtccagccccatcccgccgatcacttccgtcgcccagattgggtcgccggagaacaggctatcaaattccggtgtacgcaggaagcgtaccatacggatcttcatgatgaagtgatcgatcagttcctgtgcctgctgctcattgagtacgccagctttaaagtcgcgctcaatgtagatatcgaggaagcttgccgtgcggcccaggctcatcgcgccgccattttggcttttcactgccgccagataagcgaagtagagccactgcaccgcttcctgcgcattctgcgccgggcgagagatatcaaagccatatttcgccgccatttcctgaatctgcaacagcgcatgacgatgctctgccagctcctcacgcagacggatggtggcttccagatcctcgcctttttccagacgagactggagatcggcaaattgcagttcgcgttcacgtaccagataactgatgccatacagcgctacgcggcgatagtcaccgataatgcgcccacggccatagccatctggtaaaccggtcagcacgccagatttacggcagcgcagcatatccggactgtaaacatcaaatacgccctggttatgggttttacgcagatcggtaaacagatattcaaattcactgtccatttctcggccataggcgtggaaactacttttaatcatattaatgccaccgaacgggtgtagcgcacgtttcaacggcgcatccgtttgcaggccaacaattttttccagcggctggttaatatatcccgcatcatgagcggtaattgtggtggcaatattggtatcgaaatcaaccggcgcgtgggttgcattttcgatacggatgccttccattactttttcccacaattccgtggtggcaggcgtcgcttcggcgaggaaagattcatcgccttcatacggtgtatagttatgttgaataaaatcgcggacattaatttcgtttttccagtccgtacctttaaagccaagccatgcgtcggcgtacagcttatcgctggtatcaatatctaccttcatgaaaaataatctctctacaatacttcaactaaattatgcaaattctgcgggcgcgttaactttgcctaaatgaatggcatccaaagcaatcattttttcttcgttagtcggaataacggcacaaatgacacgcgcattttcactggaaacaattcgctcaccacaggagttagagcgattattcatttctgtatcaatctctaagcctaatacagccaaatgttccatgaccagacgacgaattaagctactattctctcctattccgccggtgaatataattccatccaggcgacgtaaactagctgcgtgtccggcaatatgacgggcaattcggtgaacaaaggttttaattgccagttgcgcgcgttcgtgaccttcatgccaggctttttccagaacacgtaaatcgctagaaagaccggaaatacctaataatccgctctctttattcactacgcgttccaggtcacccaggctctggttggtttggctggcgacccaggacatcgcaccaaagtcgacatcgccactgcgggtacccatcatcaagccttccagcggcgtcattcccatactggtatcaacactctgaccgttgcgaaccgcgcagatactcgcgccattgccaagatgcgccacaaccaggccggagtcatcttccgccagattcagcaggctatgtgcgcgctgggaaacatagcggtggctcgtgccgtggaaaccataacggcgtacacctaactcttcataatatttccacggcaggccgtataaataagcttccggagccatcgtctggtggaaactggtatcaaataccgccacctgagttacgcccggaaataattgctgcgcgctttcaataccacttaaattggcgtaattatgcaggggtgccagtggagaaacgcgacggatattatcaatgacttcatcggtaataatggcggactcggtaaaaatactgccgccgtgagcgatgcggtggccaattaaggccacactgtcatttaaattccgtttttccagttcaaatgcaattgccttcaatgcaccttcgtagctgtggtgagccagcggtgctggctctcccccatttacggataagaatgcattttcgctgttaataccgtcggcaataccactcattaatacttcacagtcgctggcatcgagcacggaaaacttaatgctagagctaccacagttaataaccaaaacaaccggaaattcattcatctcttttctcatcctgagttacggattaaaacagtttgtatacgatgttcaggatggtcagcagaccaatcacggtaacaaacacgttatccagacgaccacggtatttcgccagagacggcgctttacggatggcatacatcggcaacaggcacagcagggatgcgataatcggtgcgcccatggcttcaatcaggtcaaggatgttcgggttggcgtaggcaacaacccaggtggagcccatgatgaagatcatgctgatagtgttcagtttacccaggctcactttagttttgtcgcctttataaccaaacttcaggaccaggccattcagaccttccagcgttcccagatagtgaccgaagaaagatttgaagatagccacgagtgcgatgatggaagccgcatattccagtgtaatcgcgaacgttgttttggtaccggtcatggacgcaaagtggttagccagataagaaagcactggaatattctgcgctttggcttccgccatgttggccggagacagagtaaacaggcagctaaaggcaaagaacatcaccactgcaaccatcagcatgctggcacgagaaatgatttgggaacatttacgttcggtgaagtcgcgaccgaagtctttctcatactcttcacgcttagaaaccacgaaggaagagacgattgggctgaagttaaaggagaaaaccatgatggaaatccccagccagacagtgatcaggataccgtcatgaccggttaagctcaggctaccgaggtcaacctggtcgataactgcagagttccagtaagggatcaggctcaaagaaatcagcaccaggctggcgataaacggccataccaggtagctcatcactttaaccatcagatccttaccaaaccagatgacgaaagccatcagcagcaacaggaacagcgccacaaagccgcgattcagcggtgcaaagccgagctggttttcccagaacgtcataaaggtattggtaatagtaacgccataaatccacagcagtgggcaaatcgcgaagaagtacaggaacgtgataaccacgccgccagttttaccaaaatgctcttccaccgtttccgtaatgttgccggaagggttagagccagaaagacacagacgcgccagcgcccggtggcaataaaacgcgatggggtatgccaataccaacatcagaagaatcgggatcagtccgccaaaacctgcgcggatagggaagaacagcaccccggcgccgattgccgtaccaaacaagcctaacgtccatgtggtatcacttttacgccaggagctttgttttgtctggctggatacaatgctatcactagtactcatatcctatcctcaacgaattaattaagcgtcaacgaaaccggtgatttgagagacgcgagaaagatcgatattgccgccggaaataatactgacggtttttctgttttgaatatattggtctaatttaccgcttaataatgcagcacatgccagagcgcctgcgccttcggtgacgactttattgcgctgaattaaggcaatcatactgtttctgatttcgtcttcgctgaccagcacgatgtcatcgactaattcacgaacgatttcgtaagttaaattacccgggcgggagacatcacaaccatccgccagggtgccggtagttcggtgcgtggttatttctccggagtggaaagaagccgccatgccgtgaacgttttcagactgtacgccaataacacgaatggtcgggttaatagatttaattgccaccgcaataccagcaattaaaccgccaccaccaattggcacaatcacgttatcgacatcatagagatcttccataatttccagaccaatcgttccctggccagcaatcactttcggatcatcgtaaggtgggataaaaatacggccttccatttcgacaatttcgctcactttagcgatagtgtcgttgaagttatcaccatgcagaacgacttctgcggagtagtcgcacgttgccgctactttggattttggcgcaccttttggcatcaccactttaccgtcgatacccagcatcgcgcaggagagggaaaccccttgcgcatggttgcccgcagaacaggccaccacgcctttgcgtttttccgcatcggtcagactacttaatttattaaatgcgccacgaattttaaaactacccgtacgctgcatattttcaaacttcaggaatatttcacctttgcaacgttcactaaaatagttggagcgaggcatgcctgttttataaattcgcccagccagtcgttgtttcgcttcaataatgtcatcaatagcaaccggcagatcgtatgtaatatgcattataaaacctcttcgcctgaattaaatatgtaggtaaccgtaaccgacacctgcaagacagacaggtggattatttatgtttaaataaaaacaaataattaaccaacttctattaattgccttcgtctacacccattataagaactatactctttggctaattccaccaaaacgcttgctgcttttttaatacgataatttttgctccataccgcggcatattgtgccacaggtaatgtttcttcaaccggaatagtaataaattgattagaaccaaaaggactcgtcatatcacaaggaattacagttaagaaatcagcattgagaacaagattataaattgtcacgacactgtcggttttaacgatgttttcaatactgatgccatttctttgtaacgtagtaagcagttcgctgtagtaccccatattagtttgtggcaacacccactgttcgttcttcaagctctccagcgtggtggtgccggtgcatgttcgggacttactggctaccagcacaaactcggactcgaacagcggctcaacatgtaaatcctgaagcttcatttctgcacttaacgtaccaatcgcaaaatccagtcgaccgtcgcggattgccggtaagaagctagacagttgcgcttcatacatagaaacctgcgctttcgggaacacctctttgaacttgttgatcatcccactcataaaagtaaaaccaatcaaactaggaaaaccaaaactgacttccaccaccgcctcagaagacataccgcttatctcattaaccatatttttcatttcacgggtaatggattcggaacgggagagtaacaattgaccggcaggtgttaatgttacaccggtatttttccgcaccactaattccacaccaaaataatcttcaatatcgttaatgattttactgacggccggttgagttaaccctaattcttttgcagcgctgccgatagaaccacttctaatgacttcctgaaagactaccaggtgctgcgttttcggaagaagaatagtgctcataacgacctacgttaattacctcattgacggcatgaagtgtatcaaaatgaaatgaacaggatatgtgcgaccactcacaaattaactttcaatactttccagagtatcgttattacaattaaatacctttaaatatcaacaagttaaagtataaaaatcagcataaaccctgatttttgtcaaaaaaaatgacggggataaccatattttatggcgataacatcattcgttatgtggttaatacaaaaaaggggctgagaccatatttcaagcaattaccggataattaccaggcaaaatttgagttaaatttaatgagcaagttcagtaattttattataaataaaccatttagtgtgataaataatgcggcatgtcacatttttagtcgctatttgttggagaacaaacatttattttatcaatattttaaaattagcaatacatgtattgatcatctcgaacaattgattaacgtcaactttttctcttctgacaggacgagtttttgtgaatgcaatcgttttccataaattcttctcccctcataggcgacgaatagcattttgtgttgaggatcacaaaacgaataattgctgatcgccgcgataaggtcagacaaagacaacaagggaaattttcacagagcttttgatcggcgtaggccacagaatgttgcttcgtttactgtaacgccgggtaaatgagcgttttttgatagtgcgaaagaaccctgcgaggaaaataagcatctattattgtttgtcatgatgacaaggcaggcatcaatgaaaggcttcccaattgcgcatatttttcaccctagtatcccgccaatgcacgcagtggttaacaatcacaatagaaatattgattattggacggtaaaaagaaagtttgcagaaattgtctccaccaatgacgttaataaaatttacagtataagtaatgaactgcggagagtattatctgcaataactgcattgaatttctatcatggcgatgttccttctgtcatgatccgaatccaaccggaaaatatgagtccattcattatagatatttctacaggagaacatgatgattatatcatacaaacattagatgtaggcacttttgcaccttttggtgaacaatgtacttgcagtgccgtcaataaaaaagagctggaatgtattaaggagacgatttctaagtattgtgcaaaattcacccgaaaagaagccatcttaaccccccttgtgcactttaataaaaccagcattactagtgattgttggcaaattctcttttttagtcccgatcattttaataatgatttttattgattatttataaaggataaaataatgttccctgttagtagtattggtaatgatattagtagtgatttagtccgtcgaaaaatgaatgaccttcctgaaagcccaacaggaaataacctcgaagcactagcaccaggtatagaaaaactaaaacagacctctattgaaatggtcactttacttaacacgttacaacctggtggaaaatgcattatcactggtgattttcaaaaagaattagcgtacttacaaaatgtaattctttataatgtcagctctcttcgtctggattttttaggttataacgcccaaattattcaacgaagcgacaatacttgtgaacttaccattaatgaaccgttaaaaaaccaggaaatatccacaggtaatatcaatattaattgcccattaaaagatatttacaatgaaatcaggaggttaaacgtaatttttagttgtgggactggagatatcgttgatctatcctctctggacttacgtaatgtcgatttagattattatgatttcacagataaacatatggctaatactattttaaatccttttaaattgaatagtacaaattttactaatgccaacatgtttcaggttaattttgttagtagtacacaaaacgccacaatctcctgggattatttactaaaaataacgcctgttttaataagcattagcgatatgtattctgaagaaaaaatcaagtttgtcgaaagttgtttaaatgagcctggagacattaccgaagaacaattaaaaattatgagatttgcaattataaaatctataccaagggcaactcttacagataaattagaaaatgaattaacaaaagaaatatataaaagcagtagcaaaatcatcaattgcttgaacagaattaaattaacagagatgaaagaattcagtagtgaaaaaatatatgattacatcgatataatcattgaagattatgaaaataccaaagaaaatgcttatctggtcgtcccccaaattaattatactatggatttaaacatagaagactctagcagtgaagagttacttagtgataataccctcgagaaagacgaaaattctccggacaatggctttgaggtcggggaatataacacatatgaagcatataacagtgagaagcaatattttaccagagaggactatacgtatgattacgaccttttaaatgcaatataaacttaataacttcttacaaagtctattattaataccgtagatatttattcatcttaccctgtgcaccaaaagcaaaaactcactgacgcgggtttgaaactgatggcaaccgcaaaaatgcctgatgcgctacgcttatcaggcctacgccatctctgcaatatattgaatttgcgtgcttttgtaggcaggataaggcgttcacgccgcatccggcatgaataaagcgcactcaacaatctgaaacccgccggaacggtttattacgtacatcaggtaaaactgaccgataagccgctttcttttgggtatagtgtcgtggacagtcattcatctttctgcccctccaaaagtaaaaacccgccgaagcgggtttttacgtaaaacaggtgaaactgaccgataagccgctttcttttgggtatagtgtcgtggacagtcattcatctttctgcccctccaaaagcaaaaacccgccgaagcgggtttttacgtaaaccaggtgaaactgaccgataagccgctttcttttgggtatagcgtcgtggacagtcattcatctttctgcccctccaaaagcaaaaacccgccgaagcgggtttttacgtaaatcaggtgaaactgaccgataagccgggttctgtcgtggacagtcattcatctaggccagcaatcgctcactggctcaagcagcctacccgggttcagtacgggccgtaccttatgaacccctatttggccttgctccgggtggagtttaccgtgccacggactgttaccagccgcgcggtgcgctcttaccgcaccctttcacccttacctgatcccgcttgcgcgggccatcggcggtttgctctctgttgcactggtcgtgggtttcccccccaggcgttacctggcaccctgccctatggagcccggactttcctcccctccgcccgtctcccccgaagaggacgacgacgaagcggcgactgtctggtcagcttcggcgcgcagtatagagggtttgcgcgcccttgtcaccccgcgttgcgcattccaatcgccagtgtcgcggcgatattacgactagcacggcagatattgtcataagccccgcggaatgcttcgtccaacgtacctatgctggtcaatacgctgaagaccgcatcaatgccatgctgatgtacaacgccaacatcatcggtcaggctacccgcaatgccaatcaccggtttatggtacttcttcgccacgtttgcgacaccaatcggtaccttcccgtgaatactctggctgtcaatacgcccttcaccggtgatcaccagcgtacaatcgtgaatatgttcctccagattcagcgccgtagtgacgatttcaataccacttttcagttccgcaccaagaaacgccattagcgccgcgcccataccacccgcagctcctgcaccggggacatctttcacatcaacatgcagcgcttttttaatgacctcggcatagtgagagaggttattgtccagctcaacaatcatcgcttcactggctcccttttgtgggccaaagatgcggcttgcgccgttatcgcccaccagcggattggtgacatcacaagcgacgcgaatgacgcaatcttttaagcgcggatcgaggccggaaatatcaatatcattcagagtattaagactaccgccgccaaaaccaatttcattgccgttggcgtcgcataatttcgcccccagcgcctgtaccatgcctgcgccgccatcatttgtagcgctgccgccaatgccgataataatgtttgtcgcaccgctctccagcgcctgcaggattaactcgcctgtgccgcgactagtggtcacgagtggatcgcgtttttccgcaggtaccagctccagcccactggccgccgccatttcaataaacgcggttttgccatcgccggagatcccccaactggcattcactttctcgcccagcggccctgtaacccaggcgtgacgttcagccccctgggtggctgcaatcatcgcttccaccgttccttcgccaccgtcggcaaccggaacagaaacgtactgtgcatcaggaaaaatttcccgaaatcctttttctatcgcctgcgcaacctcgctggcagataaactttctttataagagtctggggcgattacgattttcatacctatgcctgttaccacatgacgccggagggcgtttctcttattcggcctggattccaggcccggattgcaatacgccatccgggcacgacgtcattaacgagtaacttcgactttcgccagtttttcgtagtagcacgccagggcgctatgatccgccgttcctaaaccatctgctcgcagtgcctgcatcatctccataaccgcagctgtgagcggcagttgtgcgccgacgccgtgagaagtatccagcgcattcgccagatccttaatatgcagatcaatacggaagcccggcttgaagttgcggtccatcaccatcggcgctttggcatccagcacggtactgcccgccagtccaccgcgaattgcctgataaaccaggtccgggttaacgcccgctttagttgccagcgttaacgcttcactcatcgcggcaatattcagcgccacaatgacctgatttgccagtttggtgacgttacctgcaccgatttccccggtatgcaccacggaacccgccatcgctttcatcaaatcatagtatttgtcgaaaatagccttgtcgccgcccaccatcacactcagcgtaccgtcgatggctttcggttcaccgccgctcaccggagcatccagcatatcaatgcctttcgctttcagcgcttcgctgatttcacggcttgccagcggtgcgatagaactcatatcgatcaataccgtacctggcttcgcgccttcaataatgccattctcacccagcgccacctctttcacatgaggggagtttggcagcatggttatgatgacgtcgcactgttcagcgatcgctttagccgtagacgctgtttctgcacctgcagcaatcacgtcagcaatagcttctgggttacggtcagcaaccaccaggctgtaacctgctttcagaaggtttttactcattggtttacccataatccccaggccaataaaaccaactttcatagtcatatcaatcatctctcttgttgcggtggtggttattttttaaaggtatcagccagtttctgagtggcagagcggaagacgccgagatcgctgccgacagccacaaacgtcgcgccccattccagataacgacgcgcatcggcttcgaccggcgcgaggataccgctgggtttgccgtgcgcgctggcacggttaaaaatgtgctgaattgctttttgtacatccgggtgacttgcattgccgagatggcctaatgccgcggccagatcgctggggccgacgaagatgccgtctacgccttcggtagcggcaatggcatcgacgttatctacgccctgctgactttctatctggaccagaatagtgatgttcttgttgctctgagcgaaataatccgccacggtgccaaacatattggcgcggtgagaaacggagacgccgcgaatgccttccggtgggtaacgggtacttgccaccgccagctctgcttcctcttttgtttctacaaaaggaatcaggaagttatagaaaccgatatccagaagacgcttaataattaccggctcgttggtcggcactcgcactactggcgcgctggcgctgcctttcaaggccattaactgcggaataaacgtggagatatcgtttggcgcatgttcgccatccagcaccagccagtcaaacccagccaaaccaagaacttcagtgctaatcgggttagagagtgcactccagcaaccaatttgtacctgtttcgcagccagtgcggctttgaatttattcgggaaaacatcgttattcatcgcttatacctttgcttatttctgcaattccatacgtttaatgtcgccaactacgaagaggtagcagaccatcgccatcagcgcactacatcccacgaaaaccagtgctgcattgaaggagtgcagttcacttaccaggtagccaatcaccagtggagtgacaatggaggcaacattgccaaagacgttaaagacgccgccgcagaggccaacaatctctttcggcgcggtgtcagaaatcaccggccagcccagcgcaccaaatcctttgccaaagaaagccagcgccatcagcatgaccaccagcgtggtgttgttggtgtagttacataagatgatggtggaagccagcaacattcccagcacaatcggtagcttacgtgccagggtcagggataaaccgcgtttgatcagataatcgctgaagacacctcccagcacgccgcccgcaaaaccacacagtgctggaatgctggcgaccagacccactttcagaatgctcatgcctttttcctgcaccagataaatcgggaaccaggtgaggaagaaccaggtgatggtgttgataaaatattgtccgaaaaatacgcccagcatcatgcggttagagagcaattgcttgatgtaatgcagtttgggtccgcttgctgccgcactgcccggctttttgtggtccatatcgaccaccgcgccattttcagagataaacttcagctcttccgcagacatacgtgggtgatctgtcgggttatgaatcaacttgatccacagcgccgtcagcacaaaaccaatcacccccataacggtaaagacgtgctcccagccccaggcgaaagtcagccagccaagcagcgggctaaagagcgccaggctgaaatattgcgcgctgttaaagatggcggaggcagtaccacgttctttcgtcgggaaccaggcggcgacaattcgggcgttcgccgggaaacttggcgcttcgctgaagccgagcataaagcgcataaagaacatggagatccctgcccaggccagcgggaacatatcaacaaagccttgcaggaaggtgaataggctccagaaaaagaggctgtaggtgtaaacttttttgctgccaaacttatcaagcagccagccgccggggatttgcatcagcaagtaggcccagccaaaagcggagaagatgtaacccatgctaaccgcacttaactgcaactcttttgccacttcggtaccagcaatagacagcgttgcacgatcggcgtagttaacggcggtaacaataaaaataatcagtaatattaaatagcgggtatgcacgcctttctttttttcgtcaacggtgtccagaatcattttatttacctcgggtacttatgctgatttttattattatggggaaggtgttatttatgagtttcatttatgccgtaacgacaatgaactcgggaattagtataagcagcgcgagaataataatcattgtgcaaatgctaatttaattaatactatttaaatattattttgagcatatgcacataaggttgcgcgctaaagcacagatttgcgctttaccttaccgggcggcactgcaatccctgaaatgattgacattgatcacatttctgcgtttaaactcctgacattcttatttcacccaatgaagtcatttatttttaaatgagaccaggtcctcattttaataacccctggctggagaatattgcacaatggccaacatcgaaatcagacaagaaacgccaactgcgttttatataaaagttcacgacacagataatgtggcaattattgttaatgataatggcctgaaagcaggaacgcgttttccggatgggctggaattaattgaacatattccccaggggcataaagtcgcattgctggacattccggctaatggtgaaattattcgttatggcgaagtgattggttacgccgtgcgtgcaatcccacgcggaagctggatcgacgaaagcatggttgtactaccggaagcgccgccgttacacacgctgccactggcaaccaaagtcccggaacccttaccgccgctggaaggatacacctttgagggctatcgcaatgccgatggcagcgtgggcaccaaaaacctgctcggtatcaccaccagcgtccactgtgtggcaggcgtggtggactatgtagtaaaaatcattgaacgcgatctgctaccgaaatacccgaacgtcgatggcgtggtggggctgaatcatttgtacggttgtggcgtggcgattaacgcaccggcggcagttgtacctatccgtaccattcacaatattagcctgaatcctaactttggcggcgaagtaatggtgattggcctgggttgtgaaaagttgcagcctgagcgcctgctgactggaacggatgatgtgcaagctattccagtagaaagcgccagcattgtcagtttgcaggatgaaaagcatgtcggttttcagtccatggtcgaggatattttgcagatcgccgaacgccatctacaaaaactgaatcaacggcagcgagaaacctgcccggctagtgaactggtcgttggtatgcagtgcggtggcagcgatgcgttttctggtgtaacggcaaacccggcggttggctatgcgtctgatctactggtgcgctgcggcgcaacggtgatgtttagtgaagtaacggaagtgcgtgacgcgatccatctgctgacaccacgcgcagtgaacgaagaggtcggcaaacggctgctggaggagatggagtggtacgataactatctcaatatgggaaaaaccgaccgcagcgccaaccctagcccgggcaacaagaaaggcggtctggcaaacgtggtagagaaggcactcggctccattgctaaaagcggtaaaagcgcaattgttgaagtgctgagccccggtcaacgcccgactaaacgcggattaatttacgccgcgacgccagccagcgattttgtctgtggcacgcaacaggtggctagcggtatcacagtgcaagtgtttacgaccggtcgtggtacgccgtacggcctgatggcggtacccgtcattaaaatggcaacccgcaccgagctggcgaaccgctggtttgatttaatggatattaatgcgggcaccatcgctaccggcgaagaaactattgaagaggtgggctggaagttgttccactttattctcgacgtcgccagcgggaagaagaaaaccttcagcgatcaatgggggctgcataaccagctggcggtgtttaacccggcaccggtgacctgatttcttttggaacgtccctcgcaaaacatggccttagtgccatgtttttattgtttaaagcccccacgtccattaataatgcatttgcattaccttagttcaagcttataatttgagcagaaaacaggctgtaaaaggacagtgaatcatgcccgctaatgctcgctctcacgctgtactgaccactgaaagtaaggtcacgatacgcggacaaacaactatccccgcgccagtgcgtgaggccttaaaactgaagccaggccaggacagcattcattacgaaattctgcctggtgggcaagtatttatgtgccgactgggagatgaacaggaggatcatactatgaatgcatttttgcgttttctggatgcagatatccagaacaacccgcaaaaaactcgtccattcaacattcaacaaggaaagaaacttgtcgctggcatggacgtcaacattgatgatgagattggcgacgacgaataatggattttccacaaagggttaatggttgggcgctatatgctcatccctgttttcaggaaacctacgacgctttagttgccgaagtcgagacattaaagggaaaagatcctgaaaattatcagagaaaagccgccacaaagttattggcggtagtccataaagtgattgaggagcatatcacggtcaatccaagtagtccggcattccgtcatggcaagagcttaggctctgggaaaaataaagactggagtcgggtaaaatttggtgctggtcgttatcgtctcttctttcgttatagtgaaaaagagaaagtcatcattctgggatggatgaacgatgaaaacactctgcgcacctacggtaaaaaaacagatgcctataccgtattcagcaaaatgttaaaaagaggacatcctcctgccgactgggaaaccctcacccgagaaacagaagaaacccattgatggtgttcacaatgcccgccgaacgcattcgtgttgaccagcgggcatcctttctcactccccgaccagaatcacttcaaccccagcctttcgcagtccttccaggctatccgcaggaatgccttcatcaacaatgatcatgtcgatacgttgagtatcaatgatcttatgtaaactggaacgattgaacttactggaatcggtgaccacgatgatccgttccgcaacttcgcacatccgacggtttaaacgagcttcatcttcattatgtgtgctgacgccgcgctccagatcgatcgcatctacaccaagaaacagcatatcgaagtggtaattttgcaggctttgctcagcctgatcgccgtaaaaagattggctctgacggcgcaaatgcccgccggtcatcagcagctcaacgccttccgcttccagcaacgcattagccacgttcataccgttggtcatcgcaattacgtcagtgtgcttgcgcatcagacgagcaatctcaaaagtggtggtcccggaatcgaggataacccgatgacctggctgaatcaactcaacggcagctttcgcaacgctgcgtttcatcgcggtgttcagtgcgcttttatcttccacacttggctcgacactcggcgtcgtgctatcgcagatcaacgcgccaccataggcacgcacagcgatcccctgcttttccagaaacgccagatcgttgcggatcgtcacagtagatacgccatacaatgcgctcagatcgttaacctgcacactcccttgctgtcgcagacgctgaatgatctgttctcgtcgctcgctggtgccagtcactcgcttctcaccactagcgtcggtattactcatagtaagtcctttcgtaaaactttcgtttcatttcgttttgcctattaacgcctttctattaagcaaatgcaagcccaccttgcccattgacgcaagctactctcgtttcagtgactttcattatgtttcttttgtgaatcagatcagaaaaccattatctttcgttttatttttatctcaccatgacgcagtatcaactgaaacaaaacgaaagattaatatcgcagtaatctgaactggagaggaaagtgaaacatctgacagaaatggtgagacagcacaaagcgggcaaaacaaatggaatttatgccgtttgttccgcacatccgctggtgctggaagctgcaatccgctacgccagtgcaaaccaaacgccgttactgattgaagcaacctccaatcaggtagaccagttcggcggttataccggaatgacgcccgccgattttcgcggctttgtttgtcagctcgccgacagcttgaatttcccgcaggatgcgttgattctgggtggtgaccatctggggccaaaccgctggcaaaacctgccggccgctcaggcaatggccaatgccgatgatttgattaaaagctacgttgcggcaggattcaaaaaaatccaccttgattgcagcatgtcctgtcaggacgatccgattcccttaactgatgacatcgtggctgaacgcgccgcccgtctggcgaaagtggcggaagaaacctgtcttgaacactttggcgaagccgatctggagtatgtcattggtaccgaagtgccggtacctggcggcgcgcatgaaaccttaagcgagctggcggtcaccacgccggatgccgcccgcgccacgctggaagcccatcgtcacgcctttgaaaagcaaggtttgaatgccatctggccacgcatcattgccctggtggttcaacccggcgtcgaattcgatcacaccaacgttattgattatcagcccgccaaagcgagcgccttaagccagatggtcgaaaactacgaaacgctgattttcgaagcgcactctaccgattatcaaacgccgcaaagcctgcgccagctggtgattgaccactttgccattctgaaagttggcccagcgctgaccttcgccctgcgtgaagctctgttctctctggcggcgattgaagaagaactggtgccagcgaaagcctgttctggtctgcgtcaggtgctggaagacgtgatgctcgaccgcccggaatactggcaaagccactaccacggtgacggcaacgcgcgtcgtctggcgcgtggttatagctacagcgatcgcgtgcgctattactggccggacagccagattgatgacgctttcgctcatctggtacgtaatctggcggatagtccaattccgctgccgctgatcagccagtatctgccgctgcagtacgtgaaagttcgctccggcgagctgcagccaacgccacgggaactcattatcaaccatattcaggacatcctggcgcagtaccacacagcctgtgaaggccaataagcaaaacaaagaggaacacgctatgccaaatattgttttaagccggattgatgaacgcttgattcacggtcaggtcggcgttcaatgggtcggatttgcgggggcaaatctggtgctggtagccaacgatgaggttgccgaagatccggtacaacaaaacctgatggaaatggtactggcagaagggatcgccgtacgtttctggacgctgcaaaaagttatcgacaacattcatcgcgccgccgatcgacagaaaatcctgctggtttgtaaaacacccgccgatttcctgacgctggtgaaaggtggcgttccggtgaatcgcattaacgttggcaatatgcactacgccaatggcaaacaacaaatcgccaaaacggtttctgtggatgcgggcgatatcgcagcatttaacgacctgaaaaccgctggggtggaatgcttcgttcagggcgtcccgacagagcctgctgtggacctctttaaattactttgagggattcatcatggaaatcagcctgttgcaggcatttgcgttgggcattatcgcctttatcgctggcctggatatgtttaacggcctaacccatatgcaccgcccggtggtcctcggcccgttggtcgggctggtacttggcgatctgcataccggaattttaaccggcggtacgctggaactggtgtggatggggctggccccgctggcgggcgcacagccgcctaacgtgattatcggtactatcgtcggcacggcgtttgccattactactggcgtgaaacccgatgtcgcagtaggtgtcgccgtacctttcgctgtcgcagtacagatggggattaccttcctgttcagcgtgatgtccggcgtgatgtctcgctgcgacctggcaacaaacccgcgccgcatttgatgctggtgccgacggcctggtgcattgctataacgggatgacaggtttacatcaccgcgaaccgggaatggttggcgcgggattaacggacaagcgcgcctggctggaactgatagccgatggtcatcatgtgcatccggcggcaatgagcctgtgttgttgctgtgcgaaagagagaatcgtactgatcaccgacgcgatgcaggcagctgggatgccggatggtcgctatacgttatgtggtgaagaagtgcagatgcacggtggcgttgtccgtaccgcgtctggtgggctggcgggcagtacgctgtctgttgatgcggcagtgcgcaatatggtcgagttgacgggcgtaacgcctgcggaagccatccatatggcgagcctgcatccggcgcgaatgctgggtgttgatggtgttctgggaagccttaaaccgggcaaacgcgccagcgtcgttgcgctggatagcgggctacatgtgcaacaaatctggattcagggtcaattagctagcttttgatagtttgctcctttattgggccttcacttcccccgtaaggcctttctttttctttcgttttgatctgtgcagcggtgtcggatgcgacgctaacgcgtcttatccgacctacagttggtgaccgcaaggccggataaagcgtttgcgccgcatccagcaatcccttttgcttcctttatcttttctttcaacgatcacaaatttcgttttatttcttttttctccattgaactttcagtttcttttctatagattttaatcaacgaaagacatcaccaagtgaaatgaaacgaaaggcaagtgaaagcgacaacgcccgacgtcaagttcatcagactaaggattgagttatgccagaaaattacacccctgctgccgccgcaaccggtacatggactgaagaagagatccgccatcagcctcgcgcatggatccgtagtctcaccaacatcgacgcgctacgttccgcgctcaataacttccttgaaccgttactgcgcaaagagaatctgcggatcatcctgaccggagccggaacgagcgcatttatcggtgacatcatcgcgccgtggctcgccagccataccggtaaaaacttcagcgccgtaccgaccaccgatctggtcaccaatccgatggactacctgaacccagctcatccgctgctgttgatctccttcggtcgatccggcaacagcccggaaagcgtcgcagccgtggaactggcaaatcaatttgtaccggaatgctatcacctgccgatcacctgcaacgaagcgggcgctctttaccaaaacgcgatcaacagcgataacgcgtttgccctgctgatgcccgcagaaacgcacgatcgcggctttgcgatgaccagcagcattaccaccatgatggccagctgcctcgcggttttcgcacctgagacgatcaacagccaaaccttccgcgacgtggcggatcgttgccaggcgatcctgaccagtctgggcgatttcagcgaaggtgtgtttggttacgcaccgtggaaacggatcgtttatctcggtagcggtggcttacagggcgcagcacgcgagagcgcgctgaaagtgctggaactgacggcgggtaaactggcggccttttatgattctccaaccggattccgtcatggaccaaaaagcctggtcgatgacgaaacgctggtggtggtatttgtctccagccacccttacacccgtcagtatgatcttgatctgctggctgaacttcgccgtgacaaccaggcaatgcgtgtaatcgccatcgccgcggaaagcagcgacatcgtcgctgccggtccacatatcatcctgccaccgagtcgtcactttatcgacgttgagcaggcattttgcttcctgatgtacgcccagacgtttgcactgatgcagagcctgcacatgggcaatacgccggataccccaagtgccagtggcaccgttaaccgcgtggtgcaaggcgtaatcattcatccgtggcaggcataagaggatcgcattatgagcattatctccactaaatatctgttacaggacgcccaggccaatggctacgcggtgcctgcttttaacattcataacgccgagacgatccaagcgatcctcgaagtgtgcagtgaaatgcgaagcccggtgatcctcgccggaacgccggggacctttaaacacatcgcgctggaagagatctacgccctgtgtagcgcctattccacaacctacaacatgccactggcgctgcatctcgaccaccacgaaagcctggatgatattcgccgtaaagtccacgcaggtgtgcgcagtgcgatgatcgacggcagccacttcccgtttgccgagaacgtgaagctggtgaaaagcgttgttgacttctgccacagtcaagattgcagcgtggaagcagaactgggccgcctgggcggtgttgaagatgacatgagcgttgacgccgaaagtgcattcctgaccgatccacaagaagctaaacgctttgtcgaactgactggcgtcgacagcctggcggtagcgattggtacggcgcacggcttatacagcaaaacgccgaagattgatttccagcggctggcggaaattcgtgaagtggtggatgttcctctggtgctgcatggtgccagcgatgttccggatgaatttgtccgtcgcactattgaacttggcgtcacaaaagtgaacgttgccacagaattaaaaatagccttcgctggcgcggttaaagcctggtttgcggaaaatccgcagggtaacgatcctcgttattatatgcgcgtcggaatggatgcgatgaaagaagttgtcagaaataaaattaatgtctgtggtagtgcgaatcgaattagtgcataatcattagttttttatgatttatcccaatgtacttcccgattaatatcggggagtgccttaatggaaaaggagataactaaaccttaataaatacatcactacaatatcgcaacaataatatatttaaaaaaattatattattcaactttatggtgaggattacacaatgaccagtccaaatattctcttaacccgtattgataaccgtctggttcacggtcaggttggcgtgacctggacatccaccatcggtgcaaatctgctggtagtcgtggatgatgttgtcgctaacgatgatattcaacagaaattaatgggtattaccgcggaaacctacggctttggcattcgtttctttactatcgaaaaaaccattaacgtcatcggcaaagctgcaccacatcagaagatcttcctgatttgccgtacgccacaaacggtacgtaaattggtagaaggtggtattgacctgaaagatgtcaacgtcggcaatatgcatttcagcgaagggaaaaagcaaatcagcagtaaagtttatgtcgatgaccaggatctcacggacttacgttttattaaacaacgtggcgtgaatgttttcattcaggacgtccctggcgatcaaaaagaacaaatccctgactaaatctaaaatcgccttaatattggtttgaggtaataaaaatgcatgaaataaccctacttcagggattatccctggcggcgttagtttttgttctggggattgatttttggctggaagccttatttttattccgcccgataatcgtttgtaccctaactggcgctattctcggtgatattcagactggcttaattaccggtggtctgacagagttggctttcgccggattaacccctgcaggtggtgttcagccgcccaacccgattatggcgggtctgatgaccaccgtcattgcatggtctacgggcgttgatgccaaaacagcaattggtcttggcctgccgtttagtttgttaatgcagtacgtcattctgttcttctattccgctttcagtttatttatgaccaaagccgataaatgcgcgaaagaggcggatacggcagcgttttcccggcttaactggacaacgatgctcatcgtcgctagtgcgtatgcggtgattgctttcctctgtacttacctggcacagggggcgatgcaggcgctggtgaaagcgatgcccgcctggctgacccacggctttgaagtggctggcggtattctgcctgccgttggttttggcttgctgctgcgcgtaatgttcaaagcgcaatatatcccttacctgatcgccggtttcctgtttgtttgctacatccaggtcagcaacctgttgccggttgccgtactgggcgcaggctttgcggtgtatgagtttttcaatgcgaaatcccggcagcaagcgcaaccgcagcccgttgccagtaaaaatgaagaagaggactacagcaatgggatctgaaatcagtaaaaaagatatcacccgtctgggctttcgtagcagcctgctgcaagcgagctttaactacgaaaggatgcaggcgggcggttttacctgggcgatgttgccgatcctgaaaaagatttataaggacgacaaaccgggcttaagcgcggcgatgaaagataacctcgaatttattaatacccacccgaatctggtcggattcctgatggggttattaattagcatggaagaaaaaggagaaaaccgcgacaccattaaaggcctcaaagtggcactgtttggcccaatcgccgggattggcgatgcgattttctggtttactttgttgccgattatggcgggaatttgcagtagttttgccagccagggaaacctgctggggccgattctatttttcgccgtttacctgcttatctttttcctgcgcgtcggctggacccacgtcggttatagtgtcggcgtgaaggcgatcgataaagtgcgagagaacagccagatgattgcccgtagcgcaaccatcctcgggatcacggtaatcggcgggctgatcgctagctatgtgcatattaacgtggtgacaagctttgccatcgacaatacccacagcgttgcgctgcagcaggatttcttcgataaagtcttcccgaacattttaccgatggcctacaccctgctgatgtattacttcctgcgggtgaaaaaagcgcatccggtgctgttaatcggcgtgacttttgtgctctctattgtttgttccgcattcggcattttgtaaatggaacgaggcactgcgtctggtggtgcctctttacttaaggaatttcatcctgtgcaaacccttcagcaagttgaaaactatacggcgttaagtgaacgtgccagcgaatatttattggccgtgatccgtagcaaaccgaatgccgtgatttgcctggcgaccggagccacgccattactgacgtatcattatctggtagaaaaaatccaccagcagcaggttgatgtcagccagctcaccttcgtgaagctcgacgaatgggtggatctgccattaacgatgccaggcacctgcgaaactttcctgcaacagcatatcgtgcagccgctggggctacgtgaagaccagctcatcagctttcgctccgaagagataaatgagacagagtgcgaacgggtaacgaacctgattgcgcgcaaaggcggtctggatttatgcgttctcggattggggaaaaacggtcatcttgggctgaacgaaccgggagaaagcctgcaaccggcctgccatatcagtcaacttgatgccagaacacagcaacatgagatgttaaaaaccgcgggtcgccccgtgactcgtgggatcaccttaggcctgaaggatattctcaatgcccgcgaagttttgttactggtgactggcgaaggaaagcaggatgcgacagatcgttttctcacggctaaagtctctaccgctatcccggctagttttttatggctgcacagtaactttatttgtttaattaacacctaaccagatgaaaaatttgctcaaaatgtttaaattaacttatgtaacagtcacgcattatattaaataacatttgactgggttgaacataacgccgatagcaaaaggagttatgttcaacaatttaattttagatatacatataacttgttctattaataaatcacctcgtattctgactcgccccctggcgcagcaaagtcaggcatttatactcttttgaatacatagaaaattgatatcaatataatgaaaatatcaaatatttgcatataaatataatcttaaagttcagtctatttaatgttcaatgaaatatttctgcctgtataatctttaaagatgttgaacatatattcacattaaatatgattatgtacttgttacaaggataaggttatatatgaataaagttacaaaaacagctattgcgggcttacttgcgcttttcgcaggtaatgccgctgcaaccgatggtgaaatagtttttgatggcgagattttaaaatccgcttgtgaaatcaatgactctgataagaaaattgaagttgctcttggtcactataatgccgaacagtttcgtaatattggcgagcgtagcccaaaaattccattcactattcctttagttaactgcccaatgactgggtgggagcacgataacggcaacgttgaagcgtctttccgtctatggctggaaacgcgagataatggcaccgtccctaacttccctaatctggcaaaagtaggctcttttgctggcatagcggcaacaggtgtgggtatccgtattgacgatgcggaaagcggaaacattatgccactgaatgctatgggcaatgataacacggtttatcagatcccggcggaatccaatggtattgtcaatgttgacctcatcgcttactacgtaagtaccgtagttccaagtgaaatcaccccaggggaagcagacgctatcgttaacgtaacgctggattaccgttaatacgttagggcgttatctgacctgtcagataacgcccttttccttcctctttctcgttgtatcaggttgaaaaataactatgagtaaacgaacattcgcggtgatattaaccttgttgtgtagcttctgtattggccaggcgcttgcaggaggaatcgttttacagcgaacgcgagtgatctatgatgccagccgcaaagaggctgcgttacctgtcgcaaacaaaggcgcagaaacgccttatttactgcaaagttgggtagataatatagatggtaaaagccgtgccccatttattataaccccaccgctatttcgtcttgaggctggcgatgacagtagtctgcgaattattaaaacagctgataacctgcctgaaaataaagagagcctgttctacattaatgttcgtgccattccagcaaagaaaaaaagtgatgatgttaatgctaacgagttgacgctggtatttaaaacacggatcaaaatgttttatcgccccgcacacctgaagggacgggtaaacgatgcgtggaaaagtctggaatttaaacgtagtgaccatagtctcaatatatataacccaactgaatattacgtcgtatttgccggactggcagtcgataaaaccgatctcacaagcaaaattgaatatatcgcgcccggagaacataaacagttaccacttcctgcatctggcggaaagaacgtgaaatgggctgcgatcaatgattatggcggcagttccgggacagaaactcgtccactgcaataaaaaatataaaaacacaggtcatcagggaatgccacaacgacaccaccagggacataaacgcacaccgaaacagttggcgctcatcatcaaacgttgtttgccgatggtgctcactggcagcggcatgctttgcactaccgctaacgccgaagagtattatttcgaccccattatgctggaaaccacaaaaagtggtatgcaaacaaccgatctgagccgttttagtaaaaaatatgcacaactaccaggaacttatcaggttgatatctggctgaataaaaagaaggttagtcagaaaaaaattacatttaccgccaatgcagagcaacttctgcagccacagtttacggtagaacaactacgtgagctgggtattaaggtggatgaaatcccggcgctggctgaaaaagatgacgatagcgtgatcaacagccttgaacaaatcattcccggtacagctgctgaatttgatttcaatcatcagcaacttaatttgagcattccccaaattgcactgtaccgtgatgcaagaggttacgtctccccttctcgttgggacgatggtataccaacgctgtttaccaactacagctttacaggttctgataaccgttaccgccagggcaatcgtagccaacgacagtacctgaatatgcaaaatggtgctaattttggcccctggcgattacgcaactattccacatggacacgcaacgatcagacaagtagctggaataccatcagtagttatttacaacgtgatatcaaggcgttgaagtctcagttgcttctgggagaaagcgccaccagcggcagtattttttccagctacacctttactggcgtgcaactcgcttccgacgataatatgttgccaaacagccagcgcggatttgccccaacggtacgcggtatcgcaaacagtagtgcaatcgtgactatcaggcaaaatggttatgtgatctatcaaagcaacgtgagtgcgggtgcctttgaaattaacgatctctacccctcttccaacagcggcgatttagaagtcacgattgaagaaagtgacggtacacaacgtcgctttatccagccttattctagtttacccatgatgcagcgacctgggcatctaaagtatagcgcgaccgctggacgctatcgcgctgatgcaaacagtgatagcaaggaacccgaatttgctgaagccacggcaatatatggtttgaataatacttttacgctgtatggcggcctgctcggttctgaagattattatgcgctggggatcggtatcggcggcacacttggcgcactgggcgcgttgagcatggatatcaacagagctgacacccaattcgataaccagcactcttttcatggctatcaatggcgtacgcagtacatcaaagatatcccggaaaccaacaccaatatcgctgtcagctactatcgctataccaacgatggctattttagttttaatgaagccaatacccgcaattgggactataacagtcgccaaaaaagtgaaattcaattcaacatcagccagacaatatttgatggggtaagtctgtatgcctccggtagccagcaagactattggggcaataacgataaaaacaggaatatctctgttggggtttccggccagcaatggggagttggttacagcctgaattatcaatacagccgctacactgatcaaaataatgaccgcgcactctctttgaatctcagtattccgttagaacgctggttaccgcgtagccgggtttcctatcagatgaccagccagaaagatcgcccaacccaacatgaaatgcgtcttgatggcagtctgctggatgatggtcgcctgagctatagcctggaacaaagtctggatgacgataacaaccataacagtagcctgaacgccagttaccgtagtccttatggcaccttcagtgccggatacagctacggtaatgacagcagccaatacaattacggcgttaccggcggcgtggttatccatcctcatggcgtgacgctcagccaatatctgggcaacgcttttgcgcttatcgatgctaacggagcatctggcgtgaggatacaaaactatccggggattgctaccgatccttttggctatgcagtggttccttatctcacaacttatcaggaaaaccgtctcagcgtagatactacgcagctgcccgataacgtcgatcttgaacaaacaacacagtttgtggtgcccaacagaggtgcaatggtagcggcgcgtttcaacgccaatatcggttatcgcgtacttgttacagtcagcgatcgcaacggtaaaccgttgccctttggcgctcttgccagcaacgatgatacggggcaacaaagtatcgtcgatgagggcggcatactatatctctctgggataagcagtaaaagtcaaagctggactgtacgctggggaaatcaggcagatcaacaatgtcagtttgctttcagtacaccggatagtgaacctacaacctctgtattacaaggcacagcgcagtgccattaaggataaaaaaatgaaaagagcgcctcttataacaggtcttttgttgatatccacatcctgcgcttatgcctccagtggagggtgtggagccgacagcactagcggtgcgacaaattacagcagtgtggttgatgatgttacggtgaaccagacagataacgtgacaggacgggagtttacctctgcaacgctaagtagcactaactggcaatacgcctgttcctgctctgcgggtaaggcagttaaacttgtctatatggtcagccccgtacttaccaccactggacatcagacaggatattacaaactcaatgacagcctggatattaaaaccacattacaggcaaacgacattccaggactcacaaccgaccaggttgtctctgttaacacccgattcacacagataaaaaacaacacggtatattctgctgcaacccaaacgggtgtttgccagggtgatacgtctcgttatggacccgttaatattggtgcgaacaccacctttaccctgtatgtcaccaagccatttctcggcagcatgaccattccgaaaacggatattgccgtcattaaaggcgcgtgggtcgatggaatgggaagcccgtctacaggtgacttccatgatttagtcaagttaagcattcagggaaatctcaccgccccacagagctgcaaaattaatcagggcgatgttattaaggttaattttggattcatcaatggtcagaagtttaccacccgcaatgccatgccagacggttttactccagtagactttgatatcacttatgactgtggtgatactagtaagattaaaaacagcttgcaaatgcgcatcgacggtacaactggggtagtagaccagtacaacctggtcgccaggcgaagaagtagtgacaatgtgcccgatgtcggtattcgtattgaaaatctcggcggcggagttgcaaatattccttttcagaacggtatccttcccgttgatccttccgggcatggcaccgtcaatatgcgcgcctggccagttaatctggtcggtggtgagctggaaacaggaaaatttcagggcacagccaccattaccgtcatcgtgcggtaaaagaagacgttgcgttttgattaacgcaacgcttcggcactgttacccctgctgctccagcgcatacttatacagcgcatttttcttcacgccgtgaatttctgcggccagcgccgccgcttttttcagcggcagttctgcctgtagcagcgccagcgtgcgcagggcatcggcgggtaagtcttcttcctgtgctttatgaccttcgacaatcagcaccatttcgcctttgcgacggttttcatcttcctttacccacgccagcagctcgccaacgggcgcgccgtgaatggtttcccaggttttggtcagctcacgcgccagaaccacgtagcgggattcgcctaataccgcaacgatatcttccaggctatctaacagacggtgggtagattcataaaaaatcagcgtgcgcggctccgcttcaatggcttttagcgcatcacggcggcctttacttttggcaggtaaaaagccttcgtaacagaaacggtcagagggtaaacccgctgcgcttaacgcagtgatagcagcacacggcccgggtagcggcaccacgcggatccccgcttcacggcaggtacgcaccagatggtagccaggatcgttaattagcggcgttccggcatcggaaaccagcgcaatgttttgcccctcttgcagcttcgccagcagcgtttcagctttttgttgttcgttatggtcgtgcagcgcaaacaaccgggcattaatcccaaaatgttgcagcaataaaccggtgtgacgagtatcctcggcggcaatcagatcaacggcctgtaatacctctaacgcacgctgggtgatatccgccagattgccgattggcgtcggtacaatgtaaagctggccctgagaattatccgcgctttggtgttgtttcattgtgtcgtccgtattgccgatttaatattgagcattgcgtaaaaaaaatatcactggatacattatggtacccagtacattttctcgtttgaaagccgcgcgttgtctgcctgttgttctggcagccctgattttcgccggttgtggcacccatactcccgatcagtccactgcttatatgcagggcacggcgcaggctgattctgccttttatcttcagcagatgcagcaaagctctgatgataccaggatcaactggcaattactcgccattcgtgcactggtgaaagaaggtaaaaccgggcaggcggttgagttgtttaaccaactaccgcaagaactgaacgatgctcagcgtcgcgagaaaacactgctggcggtagagattaaactggcgcagaaagattttgctggcgcgcaaaacttgctggcgaaaatcacacctgccgatttagaacaaaaccagcaagcgcgttactggcaggcaaaaatcgatgccagccaggggcgtccttccattgatttactgcgcgcgttaattgctcaggaaccgctgcttggcgcgaaagaaaaacagcagaatattgatgccacctggcaggcgctctcctccatgactcaggaacaggcgaatacgctggtgatcaacgccgacgaaaatattctgcaaggctggctggatctgcagcgcgtctggtttgataaccgtaacgatcccgacatgatgaaagccgggatcgccgactggcagaaacgttatccgaacaatccgggcgcgaaaatgctgccaacgcagttggttaacgtaaaagcgtttaaaccagccagcaccaacaaaatcgccctgctgttgccactgaatggccaggcagcggtatttggtcgcactattcagcaaggctttgaagcggcgaaaaatatcggcactcagccagtggcagctcaggtagctgccgcacctgccgcagacgtagctgaacaacctcagccgcaaaccgtggatggcgttgccagcccggcacaagccagcgttagcgatctgaccggtgaacagcctgcagcccagccggtgcctgtaagcgccccggcgacaagcaccgcagcggtaagcgcacccgcaaatccatccgcagagctgaaaatctacgataccagtagtcaaccacttagccagatcttaagccaggttcagcaggatggcgcgagtattgtggtcggtccgttgctgaaaaataacgttgaagagttgctgaagagcaacactccgctgaacgtactggcactgaaccagccggagaatatcgaaaatcgcgtcaatatttgttacttcgcgcttagtccggaagacgaagcgcgcgatgcagcgcgtcatattcgtgaccagggtaaacaagcgccgctggtgctgatcccacgcagtagtttgggcgatcgcgtagccaatgcgtttgcgcaagagtggcagaaactgggcggcggcaccgttctgcaacaaaaatttggttccaccagcgaattacgcgcgggtgttaacggcggttctggtattgctttaacgggtagcccgattactctcagagcgacaaccgactccggcatgacgaccaacaatccaacgctgcaaaccacgccaaccgatgaccagttcaccaataatggcggtcgtgtcgatgcggtgtacattgtggcaacgccgggtgaaatcgcttttatcaaaccgatgatcgccatgcgtaacggtagccagagcggtgcaacgctgtacgccagctcccgcagtgcgcaagggaccgctggcccggatttccgactggagatggaaggcttgcagtacagcgaaatcccgatgctggcaggcggtaatctaccgttaatgcagcaggcactcagcgcggtgaataacgattatagtctggctcgcatgtatgcgatgggcgtcgatgcctggagcctggcaaatcatttcagtcaaatgcgccaggttcagggttttgaaatcaacggtaataccggaagcctgacggctaacccggattgcgtgattaacaggaacttaagttggctacagtaccaacaaggtcaggtagtccccgtcagttaaattaagtgattaacaggaacttatcatggctacagtaccaacaaggagtggtagtccccgtcagttaaccaccaaacagaccggcgatgcgtgggaagcacaagcgcgtcgctggctggaaggcaaaggactgcggtttatcgccgctaacgtgaacgagcgtggcggcgagatcgatctgataatgcgtgaaggccggaccaccatttttgtcgaggtacgctatcgccgctctgcgctttatggcggcgcggcagccagtgtgacccgcagcaaacaacacaaattattacagactgcccgcttgtggctcgcgcgtcataatgggagttttgatactgtggattgccggttcgatgtggtagccttcaccgggaatgaggttgagtggattaaggatgcctttaatgaccacagttaattaaggtttaaggattagcgtgcaagaaagaattaaagcttgcttcactgaaagcattcaaactcaaattgcggcggcagaggcgcttccggatgccatctcccgtgcagccatgacgctggttcagtctctgctcaatggcaacaaaatcctctgttgtggtaatggaacttccgctgccaatgcacagcattttgctgccagcatgatcaaccgtttcgaaacggagcggcccagcttacctgccattgcactaaatactgataatgttgtcttaacggcgattgccaacgatcgcttacatgatgaagtgtatgcaaaacaggtgcgggcgctgggtcatgcgggagatgtattgttagccatttccacccgtggcaacagccgcgatattgttaaagcagttgaagccgccgttacgcgtgatatgaccattgtggcattgaccggctatgacggcggcgaacttgcaggtttgttagggccacaggatgtggagatccgcattcctagccatcgtagtgctcgcattcaggaaatgcatatgctgacggtaaattgcctgtgcgatctgatcgataacacgcttttccctcaccaggatgattaaggagaatacatgaaggcattaagcccaatcgcagtccttatttccgcgctgctgttgcaaggttgtgttgccgctgccgtagtgggtaccgctgctgtgggtaccaaagccgcaactgacccacgcagtgtcggcacccaggtggacgatggtaccctggaagtgcgcgtgaacagcgcattgagcaaagacgaacagattaagaaagaagcgcgcattaatgtaacggcctatcagggcaaagtgctgctggttgggcagagtccaaatgctgaacttagcgctcgcgccaaacagattgctatgggcgtagacggtgccaacgaagtgtataacgagattcgtcagggccagccgattggtctgggcgaagcatctaacgatacgtggatcaccaccaaagtgcgtagccagctcttaaccagcgacctggtgaaaagctccaacgtgaaagtgaccaccgaaaacggtgaagtgttcctgatggggctggtgactgaacgtgaagcgaaagcggcggcagatattgccagccgggtgagcggcgtgaagcgggtaactacggcgtttacgtttattaaataacagccccttgtaatgcctgatgcgacgcttgccgcgtcttatcaggcctacaacgatacaaaccgtaggtcagataaggcgtttacgccgcatccgacatgttttccctcaaatcagaacaacagcgccagcccgccgacaatcacaccagacactgccaccatcgcccctgtcagccataaggctttcgccgggaacgctttgcgcagcataatcagactcggcaaactcactgccgggagcgtcatcaacaatgccagcgccggagcggttcccatacctgccagcatcatcgtttgtacaatcggaatttctgctgccgtgggaatgacaaacaagcatcctgctaccgccatcgccaccacccacatcaggctgttatcgacagcaccatcggcatgggggaataaccagacgcgagcggcacccaacaccagtactgcaaggatgtaaaccgggatcgtactccagaaaagcgtccatagcgccctgccccagcggctaaaaaacccgccctgtgcttccggtatgtcaatttcgaccggtgcctgcgtttgcggtgtttcacgcacccatttttgcaccagcgtcgcaatcagcaacaccatcaccagcccggccaccagacgaatcgccgcaaaaccccagccgaggacaaagcccataaacaccagcgtcgccgggtttaacaccggattgcccatccagaatgccagcgcaccgcccatgctcacctgttggcgacgcattcccgccgcgaccggagccgcacagcaggtacacatcatgcccggcaagctaaacagcgttcccagcagcgtgccgcgaaagcggctttgcccaagcgtacgcaacaaccagtcacgcgggatcagcacctgaatcaagctaccgaggatcacccccagcaccgccgctttccataccgcgaggaaatagatcatcgcgtaatccaacgccgcctgccatgggttagcatccgcctgcgcaaggatagatttaccgatactgtgggtttcggcagcagtaaacgctttgccgtagtaaggttcccatttcacataccagagaccggcaatgacaacgagaaagaaaagcgcgggtttccaccactgaatgggcgttgccgcctgagaactagactgaccagtcatagcattccccaggaataagttatgataattgagcgcgtgaatattacgctcactatcaattcttgggaataattattcagctcttttgcgtaattcactagagcttaaaatcgtcacgccttcatgctcaggccgcatgctctctgccagcatgacccgcgccacgtctctcgcatcaatggatttccagttacctggtaacaaacggaacagcggcgcaaaaagcgtttcgttcatccgctgtttgctacgatcgcccagtaacatgctcgggcgagcaatggtcaatttcggccagttctgggcgattaatgcttcttccatctcccctttgacgcggttatagaaaaacgggctgtgggcattggcacccatcgcactgactaccaacatatgctgcgcgcccagtcgccgcccggttaatgcggtatccactaccagcgtgtaatcggcatgaataaacgcctctttgctccccgcttctcgccgcgtggtgccgagacaacaaaacacaatgtcgatgggatcggtgacctgcgccaacgcgtcactcagttgcggatcatggggattaaacaccccgggcatatcgcccaacggacgtcgcgtcggcgcagcaatggcgttaactttcggttcgttaatcaacatccgcagcaggtgaccgcccaccagccccgttgcgcctgtaatcagtacctgactcatcttcgctcctttacagaattgtctgccttgcgctccacggctcatgcaccaggcttaatagaccatgaggtaattatccccgattgtgggaaattcgcctcatccaatgcaacaacgcggaggaagcatgagtaagaaaattgccgttttaatcactgatgaatttgaggatagtgaatttactagtcccgcagacgagttccgtaaagccggacacgaagtgattaccattgaaaaacaagcgggtaaaacggtgaaaggcaaaaaaggagaagccagcgtgaccatcgataaatccatcgatgaagtgacgcctgcggagtttgatgccctgctgctaccgggcggccatagtccggattatctgcgtggggacaaccgttttgtcacctttacccgtgattttgtgaatagtggcaaaccggtgtttgccatctgtcacggcccgcagttgctgatcagcgccgatgtgattcgggggcgcaaactgaccgcagttaaaccgatcattattgatgttaaaaatgcgggcgcggaattttacgatcaggaagtcgtggttgataaagatcagctggttaccagccggacaccggacgatctgccagcgtttaaccgcgaggcgttacgcctgctcggtgcctgattacgcctgctcggtgccactgtcgcgtagccaaatcatttttttaccaaagcccagcgtgttgtcggtgaatttgatttcatcgagccggatttcccacaccggggcgctcagcattctggcaaccggaaagcgacgattgtacgccttgcgcgcgaggtcgctttcctcaccttccagcctgcggatctcacctttaaactgcacaccgcgaattaacgctaccgttttcggctgaccgtttaccgttccggcaaccgcagcctgcggcccactcatctgcgcgtggcgcgttttttcttccgtcaaaatgtagaaggcgactttctgcgcatcaaaaagataaaaggcattagcgcaccagagttccccttcctgctgcacacaccaagtgacaacatgttgttttgccagccaacggctgatggcgatgagtgtttccattgctgttctcttttatactgtgggcctgaccttaacatgcgacgcagacgatgacaccctggtttctttacttgatccgtaccgccgacaataagctttataccgggatcaccacggatgtcgaacgccgctatcagcagcaccaaagcggcaaaggggcgaaagcactgcgcgggaaaggagaactaacgctggtgttttccgcgccagtgggcgatcgtagcctggcgttacgggcggaatatcgcgttaagcaactgaccaaacggcaaaaagagcgtctggtagcggaaggcgcagggtttgcagagctgttaagcagtctgcaaaccccggagattaaaagcgattgaaatgctcgtgatactcaaccaggccggtaacgccattcagcgcgtcatccgctaaacgatgtacctggaaggcgctttcagtgcccggccagcggcaacgcagatcgtgatgcgccgccagttcaaagccgaaacgactgtacagcgccggatcgcccagcgtcaccactgcggcatagccgaactcattaaggctatcgagtccttcatagaccagttggcgtgccagcccctgtccacggtatttttcatcaaccgccaacggtgccatgccgacccattgcaggtcttcgccctgcacatcaaccggactaaatgccacatagccaatgacctgaccttcgtcatctgtcgccaccagccccagcgtcagaaagccatcttcacgcagatcgtgaaccagcttcgcttccgcatcactttcgaaactgcgacgcagcagggcatcaatacccggcgcatcaatgggaatttctactcgaattagcatggttcacctacgcttgtctgtttggtttcaggcgcggttttcattcccgcctcaacaaaatccgccagttgcagcagcatcatgcgtaaggctttcggcatttgctccagttcaatggcgtccatcaggtttttcacatacagccccagctccgtatcgccttcaatcaccagccgacgctggaagaagagcgtatccggatcttgtttacgcgccgcaatcatcagcagatcgctggcgtcggcactaaaactcacatcagcttgcgcgttctggctaacgaccagtttgccattcaccacgctggtaaaccattgcaggtcaatatcacgcacatgaatacttaaccagcggccttcaagaaactccagctcgccatcatccagcgcctggcggaattgccagcttaagacctgctcaagaacctggcgttttagcgcaaatggcgtcagttttaccggtacactcaacagagatggccccaaatgcacaatacgggaacgcagtttatccaacacgagttttactccctgtttcaacaatcatcctattttgccatatcagaaaaataacatagcggtataaatcaacaattccatatgaaattgctgctaccaccaatacaactttaactgccttaaatcaaaaattgtcgcagcaaggttaactaaaatcccagttcgttaacatttttgcgttttgatagcgcaaccttcaggaaaaattatggagctgctctgccctgccggaaatctcccggcgcttaaggcggccatcgaaaacggcgcagatgctgtttatatcgggctaaaagatgataccaatgcccgtcacttcgccggccttaactttaccgagaaaaaattgcaggaagcggtgagttttgtccatcaacatcgccgcaaacttcacatcgcgattaacacttttgcgcatccggacggttacgcccgttggcagcgcgccgtggatatggcggcgcagctgggtgccgacgcgctgatcctcgccgacctcgccatgctggagtacgccgccgagcgttatccgcatattgagcgccacgtaagcgtgcaggctagcgcgaccaatgaagaggcgattaacttttatcatcgccattttgacgttgctcgcgtggtgctgccgcgcgtgttgagcattcatcaggtgaaacaactggcacgggtcacacctgtaccactggaagtctttgctttcggcagcctgtgcattatgagcgaaggtcgttgctatctgagcagctatctgacgggtgagagccccaacaccataggcgcgtgttctccggcccgtttcgtgcgctggcaacaaacgccgcaggggctggaatcccgcctgaacgaagtgctgatcgaccgttatcaggacggcgaaaacgcaggttatccgacgctatgtaaagggcgttatctggtggacggcgagcgctatcacgcgctggaagaaccaaccagtctcaataccctggaactgctgccggagttaatggcggcgaatattgctagcgtgaaaattgaaggccgccagcgtagcccggcgtatgtcagccaggtggcgaaagtctggcgtcaggctatcgaccgttgtaaggccgatccgcaaaactttgtaccgcaaagcgcgtggatggagacgctcgggagcatgtccgaaggcacgcaaaccactcttggcgcatatcaccgtaaatggcagtgagaaaagcaatgaaatattccttagggccagtgctgtggtactggccaaaagagacgctggaagaattttatcagcaggccgccaccagcagcgccgacgtgatttatcttggtgaagcggtatgcagcaagcgtcgggcaaccaaagttggcgactggctggagatggcaaaaagcctcgccgggagtggtaagcagattgtgctctccacgctggcgctggtgcaggcaagttctgaactgggcgaactgaaacgctatgttgagaacggtgagtttctgattgaagccagcgatctcggcgtggtgaatatgtgcgctgaacgcaaactgccgttcgtcgccgggcacgcgctgaactgctacaacgcggtgacactgaaaatattgctcaaacagggcatgatgcgctggtgtatgccagtggagctttcccgcgactggctggtgaatctgcttaatcagtgcgatgagctgggcattcgtaaccagtttgaagtggaagtcctgagctacggtcatctgccgctggcctactccgcccgctgctttaccgcgcgtagcgaagaccgcccgaaagatgagtgtgaaacctgctgcattaagtatccgaacgggcgcaacgtgctgagccaggaaaaccaacaagtgtttgtactcaatggcattcagaccatgagcggctacgtttacaacctcggtaacgagctggcatccatgcagggcctggttgatgtggtccgcctgagtccgcagggtactgacactttcgcgatgctcgacgccttccgcgctaatgaaaatggcgctgcaccactgccgttgacggcgaacagcgactgtaacggctactggcggcggctggcaggactggagctgcaagcctaagtaaatagctcactttgttaacaactttaactactctttaatgcagtattaaagattaatcggtaacaaagtgagctgttatgactgataaaaccattgcgtttagcctactcgatctggcccccattcccgaaggttctagtgcgcgagaagcattctcccactctctcgatctcgcccgtctggctgaaaagcgcggctatcatcgctactggctggcagaacaccacaatatgactggcattgccagtgctgccacgagcgtattgatcggctatctggcggcgaataccaccacgctgcatctggggtctggcggcgtgatgttgcctaaccacagtccgttggtcattgcagaacagttcggcacgcttaatacactctatccggggcgaatcgatttggggctgggtcgtgctccgggtagtgaccaacggacaatgatggcgctacgtcgtcatatgagcggcgatattgataatttcccccgcgatgtggcggagctggtggactggtttgacgcccgcgatcccaatccgcatgtgcgcccggtaccaggctatggcgagaaaatccccgtgtggttgttaggctccagcctttacagcgcgcaactggcggcgcagcttggtctgccgtttgcgtttgccagtcacttcgcgccggatatgctgttccaggcgctgcatctttatcgcagcaacttcaaaccgagtgcacggctggaaaaaccatacgcgatggtgtgcatcaatattatcgccgccgacagcaaccgcgacgctgaatttctgtttaccagtatgcagcaagcctttgtgaagctgcgccgtggcgaaaccgggcaactgccgccgccgattcaaaatatggatcagttctggagtccgtctgagcagtatggcgtgcagcaggcgctgagtatgagcttggtaggtgataaagcgaaagtgcgtcatggcttgcagagcatcctgcgcgaaaccgacgccgatgagattatggtcaacgggcagattttcgaccaccaggcgcggctgcatagctttgagctggcgatggatgttaaggaagagttgttgggataatgtgtcttaacgcgggaagccttatccgagctggcaacgctgtcctacatagacctgataagcgaagcgcatcaggcattgtgtaggcagcagaaatgtcggataaggcaccgctgattactgatacaccggcagtaaattaaagctgcttaaaatatgcaccagtgcgttgccgacgccaaacaccagaatcagcgcaatcatcggcttgccaccccagacgcggaatttcgggctgccaaagcgtttacggcttgcacgggctaacagcgccggaacaattgccgcccagatggtagccgctaaaccagcataaccaatggcgtacaggaatccgttcgggaacaacagcccccccacaactggcggggcaaaggtcagcaatgccgttttcaagcggcccacagcgctgtcgtcgaaaccaaacagatctgccagatagtcaaacaaacccagcgttacgccgaggaagctactcgctaccgcaaagttactgaacacgaccagcagcagatccagactacggctgttcagtacgccgcttaacgcctgtaccagcacatcaatattaccgcccttctctgcaataccgataaactccggacgcgggatgttacccatcgtcgccagcaaccagatggtatacagcgccagcgccatcagcgtaccgtacaccagatatttcacgatggttttcggatctttgccgtaatacttcatcaggcttggcacgttaccgtgataaccaaagcttgccagacagaacggcagggtcatcaacagatacggtgcataagacgcattgctttcggcgacgttgaacaatgtcgcaggctgcacatgccccagcaggctaccaaaggtgaggaagaaggtaatgactttcgcccccagcacaatcgctgtcatgcgactgacggctttagtgctcaaccacaccacaaacgctaccagcaatgcaaaaccaaaacccgccgcccgtgccgggacgtttagactcatctctgcgaaggtgtgatgcagaatgctaccactggcagaaatataggcataggtcaggatatagagcacaaaggcaatggaaatgccgttgaccacgttccagcctttgcccagcaaatctttggtgatggtgtcaaaactgctaccgattctgtaattcaggttagcttccagaatcatcaagccggaatgcagcatacagaaccaggtaaagatcagcgccgccatactccagaaaaaccacgccccggacatgaccactggcagagaaaacatccctgcgccaataatggtgccgccgataatcaccacgccgccaagcaggctcggactcgtttgggtggtggttagtgttgccatgagggcttctctccagtgaaaaatagtgcgactgcgttgttatgcattgcactgtaccagtacacgagtacaaaagacagaaaaaaagccccgatggtaaaaatcggggctgtatatattattttacagattgtgttcgctgttcagcgatgattacgcatcaccaccgaaacgacgacgaccggtagaatcatcacgacgcggagcgcggccttcacgacgttcgccgctaaaacgacgaccatcaccacggccaccttcacggcgttcaccgctgaagttacgaccgccttcacgacgttcgccaccgaaaccacgaccaccgccacgacgctcaccgccagtatgcggctgtgcatcgcccagtaactgcatgttcatcggcttgttgagaatgcgagtgcgcgtaaagtgttgcagcacttcacccggcatacctttcggcagttcgatggtggagtgagaagcaaacagcttgatgttaccaatgtaacggctgctgatgtcgccttcgttagcaatcgcaccaacgatatgacgaacttcaacaccatcatcgcggcccacttcaatgcggtacagctgcatatcgccaacatcacgacgttcacgacgcggacgatcttcacggtcaccacgcgggccacggtcgttacgatcgcgcggaccacggtcatcacggtcacggaattcacgtttcggacgcatcggcgcatctggcggtacgatcagagtacgttcaccctgtgccattttcagcagtgccgcagccagagtttcgagatccagctcttcaccttcagcagtcggctgaattttgctcagcagtgcgcggtattgatccagatcgctgctttccagctgctgctgtactttagcggcgaatttttccagacggcgtttgcctagcagttctgcgttcggcagttctacttccggaatagtcagcttcatagtacgttcaatgttgcgcagcagacgacgctcgcggttctcaacgaacagcagcgcgcggccagcacgacccgcacgaccggtacgaccgatacggtgaacgtaagactcagaatccatcgggatatcgtagttaactaccaggctgatacgctcaacgtccaggccacgggctgcaacgtcggtcgcaatcaggatgtccagacgaccatctttcaggcgttccagtgtctgttcacgcagcgcctggttcatgtcaccgttcagcgcggcgctgttgtagccgttacgctcaagagcttcagccacttccagagtcgcgtttttggtacgaacgaagataatcgccgcatcaaaatcttccgcttccaggaaacgtaccagtgcttcgtttttgcgcataccccagacagtccagtagctctggctgatgtcaggacgggtagtcacgctggactgaatgcgcacttcctgcggctctttcataaagcggcgggtaatgcgacgaatcgcttccggcatggttgcagagaacagagcggtctgatgaccttccgggatctgcgccataatggtttcaacgtcttcgatgaagcccatgcgcagcatttcgtcagcttcatccagaaccagaccgctcagtttagagaggtccagagtgccacgtttcaggtggtccagcagacggcccggagtaccgacaacgatctgcggcccctgacgcagggcgcgtaattgcacgtcataacgctggccgccgtacagagcaaccacatttacgccgcgcatgtgtttagagaaatccgtcattgcttcagcaacctgtaccgccagttcgcgggtcggtgccagcaccagaatctgtggtgctttcagctcaggatcaagattctgcaacagaggtaaagagaatgctgcagtttttccgctccccgtctgggccatacccagaacgtcgcggccattcagcagatgtggaatacactctgcctgaattggagatggtttttcgtaacccagatcgttaagggcttcaaggataggagccttcaggcccagatctgcaaaagtggtttcgaattcagccatgtagtacgtgtgcctcaaaattaatggcggccagtctacataactcatcatgaaattgatcagcaattttcattgaaaagtgtgaaccggctcaaagtaggtgtattaacgaacaacaacgccctcacccgttaaggtgatggcaatcaaaaaagattacgggctgatgtgtacgtcagttattgctggtcgctttctgccaggtcatcttggtcctggcccaggaggcttaattccaacaatgcgtatcggtgctcaacaaagttatgaacgttgttggcaaccgccagtttgaacagtgccgtggcgctgtccaaatcccccagacttaggtagtacttacctaaatagaagttggtttcactgagatgctcagcgaggctggtgttatccgttgcgtccgccttgagcctttccattaacgtttgttcgctaatgttgcccaggtagaactcgacaatgttccatccccactgttccttatcgcttttttcgaagtgctgtttcaacacttctttagcctgcttctcatcgagcttctgctcggcgagataaagccacagactacggaaaggatcattgggatcgtcttgataaaacgccagcagatcatcttgcgctaacttgtcacgaccgccgtaatataatgcgatcccgcgattcaagtgcgcgtagttgtaagttggatcaagctcaagtacagaatcaaacgcttcataggcagcatcaaaattgcctgcctgcgttaaatatatgcctaagtaattgaatacttcaggcatatccggtcggattgccagcgcttggctaaaatcgttacgcgctaatgccctcagaccgagactatcatacaacactccgcgctcatataaaagctgtgcgcgttcgtcatcggttaaagcccgactggcaaggatttgttccatacgtgccagaatcacttcctgctgtaaagtcggttgcaatggtaccgcgaggacttcacttttacgccaggaagtattactgcatcctgcaagcgtaagtgctgtcgcaacgaaacaccagcgcaaaaaaggcttcatttcccactcccgaagaccacggttgaatgaacgtcctgttcccggttgctaacaaggcgtcctgcccggttaaaagccccccgccgcagcggagggcaaatggcaaccttactcgccctgttcagcagccggagcttccggtgctgcagcaggttgagactgctcagtcgcttctttaatgctcagacggatacggccctggcgatcaacttccagaactttcaccggtacttcctgacccatctgcaggtaatcggtcactttctcaacgcgtttgtcagcgatttgagagatgtggaccagaccttctttaccgccgccgatggcaacaaatgcgccaaagtcaacgatacgggtcactttaccagtgtagacgcggcccacttcgatttctgcagtgatctcttcgatacgacgaatagcatgtttcgctttctcgccgtcggtcgctgcaatcttcacagtaccgtcatcttcgatttcgatggtggtgccagtttcttcggtcagagcacggattacagaaccgcctttaccgataacatctttgatcttgtccgggttgatcttgatggtatggatacgcggtgcgaactcagagatatcgccacgcggcgcgttgatcgcctgttccattacgcccaggatatgcagacgcgcacctttagcctggttcagcgcaacctgcatgatctctttggtgataccttcaattttgatatccatctgcagtgcagagataccgtcgcgggaacctgcaactttgaagtccatatcgcccaggtgatcttcgtcgcccaaaatgtcagacagtacaacgtagttgtcgccttctttcaccagacccattgcgatacccgcaacggcagctttgatcggcacacctgcgtccatcagcgccagagacgcgccgcacacggaagccatagaagaggaaccgttggattcagtgatttcagacacaacacgtacggtgtacgggaatttgtccatatccggcatgactgccagcacgccgcgcttcgccagacgaccgtgaccaatttcacgacgcttcggagaaccgaccatgccggtttcgcctacggagtacggagggaagttgtagtggaacaggaaggtatcggtacgttcgcccatcagttcatcaagaacctgcgcgtcacgagcagtacccagcgttgcggtaaccagcgcctgcgtttcaccacgggtgaacagcgcagaaccgtgagtacgcggcagcacgccagtacgcacatccagaccacggatcatatctttttcacgaccgtcgatacgcggttcgcctgccagtacgcggctacgaacaacgtttttctcgatcgcgtgcagaatttcacccagttcgttttcgtccagggtttcgtcttcagcaagcagcgtcgcgatggtttcagatttgatgacatcaacctgcgcataacgctcttgtttgtcggtgatgcggtaagcatcgctcaggcgagcttcagccagtgcagcaacgcgcgcgtttagcgcttcgtttaccggctccggctgccagtcccaacgcggtttaccggcttctttcaccagttcattgatgttctgaataacaacctgctgttgttcatgaccgaacactactgcgcccagcatctggtcttcgctcagcagttgagcttcagattcaaccatcagtacagcggcttcagtaccggcaacaaccagatccagtttgctctctttcagctcgtcctgagtcgggttcagtacgtactggtcattgatgtaacctacgcgggcagcaccaatcgggccattgaacggaataccagacagagacagcgctgcggaagcaccaatcatcgcgacgatatccgggttaacttgcgggttaacagaaaccacggtggcgataacctgaacttcgttgacgaagccttccgggaacagcgggcgaatcgggcggtcaatcagacgcgcgatcagggtttcgccttcgcttgggcggccttcacgacggaagaagctacccgggatacgaccagcagcgtaggtacgctcctgatagttaacggtcagtgggaagaagtcctgacctggtttggcttttttctggccaacaacggtaacgaataccgcggtgtcatccatgctaaccataacagcggcagtagcctgacgagccatcatgccggtttccagagtcacggtgtgttggccgtactggaatttacgaacgatcggattaagcaatgtaatatcctttctctttcttagacagtaccttacggcactggtgttaataccgcttcttctgcgcatcctcgcgactaatgacaaccctaacccagctctatgtgggtaaagcctctcattagccgcgcgaacctctgcaacggaagatcattcatagcaacaatacattagtttccagtgaattgctgccgtcagcttgaaaaaaggggccactcaggcccccttttctgaaactcgcaagaattagcgacgcagacccaggcgctcgatgagctgggtgtaacgtgctacgtctttacgtttcaggtagtcgagcagtttacgacgctgagaaaccatgcgcagcagaccacgacggctgtggtgatcttttttgtgctctgcaaagtggccctgcaggtggttgatctgtgcagtcagcagtgctacctgaacttcggtagaaccggtgtcgtttgcgtcacgaccaaactcagaaacgattttagctgttgcttcagtacttagagacattttaaaactccaaagtatatagaatgaaaggacgccgatctctaattcagcgatcccagtgtacgttacgcaaagtgttaaacaatttacgcgacgttaagcggcagtattctactcgtagcgacctgttatcgcaagacggttaacattacgccgggtattcaaccaccaggcgacgaggcgcaacgcggccttcatcgtcaatttcgcccataccgataaatttgccgttctcaccttccgtgacgcgaaccagtccttccagtggcgcaccagatgtacgaaccgggttaccatttttgaagtaaacagaagacgttaacggaagattcaccaccggatagtcgctagctggactgtccattggcatcagtaatggatcaagtaactccgcggctggaatatcctgctgttcagcttgctcaacaagttcacgcaggtgctccagggtcaccatccgttcaaccggatatttacttaccgccagacggcgcaggtaaataacatgcgcgccacagccgagtttttcacccaggtcatcaatgatggtgcggatataagtgcctttactgcagtgaatttccagctccagctcattgccttcatggcgaataaacagcaattcataaacggtaatcggacgcgcttcacgcggaacttcaatgccctgacgcgcatattcgtacagttttttgccctgatatttcagtgcactatacatgctagggatctgttcgatatcgccacggaaagtatccagtgccgctgccagctgctctgcgctaaaggttaccggacgttcttcaacgatctgtccgtcggcatcagaagtatcggtacgctgtccaagacgcgcaatgacccgatagcgtttgtcggagtccagcagatactgggaaaacttcgtcgcttccccgaggcaaatcggcaacatgccggtcgccagcgggtccagcgcaccggtatgcccggcacggttggcgttatatatacgtttcactttttgcagcgcatcgttgctggacataccctgaggtttatccagcaacaaaacgccgttaatgtcgcgaccgcgacgacgaggacgactcattagtcctccttgctgtcgtccgggttaacacgacgttcttcgtcatgtttgaccacgctggtcaccaggttactcatgcgcatcccttcaaccagagagttgtcgtagaagaaggtcagttccggcacgatacgcaggcgcatcgctttccccagcaggctgcggatgaaaccagaagcttcttgcaacgctttgatgcccgctttaaccgcgtcttcatctttgtcgttgaggaacgtcacatatactttggcatacgccaggtcgcgagacatttcgacaccggaaacggtggtcatcatgcccaggcgaggatctttaatttcacgctgcaggatgagagcgatctctttttgcatttcctgcgctacgcgctgcgggcgaccaaattctttcgccataataaattctcctgacaaaaaaggggctgttagcccctttttaaaattaatttcaggtggaagggctgttcacgttgacctgataagacgcgccagcgtcacatcaggcaatccatgccggatgcagcgtaaacgccttatcccgcatggaaccctaaaaaccttaagcaatggtacgttggatctcgatgatttcgaatacttcgatcacatcgccagtgcggacgtcgttgtagttcttaacgccgataccacattccataccgttacggacttcgttaacgtcatctttgaagcggcgcagggactccagctcgccttcgtagataaccacgttgtcacgcagaacgcggatcgggttgtgacgtttaaccacaccttcggtaaccatacagcctgcgatggcaccaaatttcgggcttttgaacacgtcacgaacttccgccagaccgataatctgctgtttcagttccggagacagcataccgctcatcgccgctttcacttcgtcaatcaggttatagatgacggagtagtaacgcagatccaggctttccgcttcaatcactttacgtgcagaggcatcagcacgtacgttaaagccaaccaggatggcgttggacgccgcagccagggtggcgtcggtttcggtgataccacctacgccagaaccgatgatcttcactttaacttcgtcagtagacagtttcagcaaggagtcggagatcgcttcgacagaaccctgtacgtctgccttcaggacgatattcacttcgtgaacttcgccttcggtcatgttggcgaacatgttctcgagtttagatttctgctgacgcgccagtttaacttcgcggaatttaccctgacgatagagtgcaacttcacgcgctttcttctcgtcacgtacaacggtaacttcatcacccgcagccggtacgccggacaggccgaggatttccaccggaatggacggacccgcttccagcacttcctgacccagttcgttacgcatcgcacgaacacgaccgtattcgaagccacacagaacgatatcgcccttgtgcagagtaccttcacgtaccagaacggtagcaaccggaccacgacctttatcgaggaaggattcgataaccgcaccgctcgccatacctttacgtaccgctttcagctccagaacttccgcctgcagcaggatagcgtccagcagttcatcgataccggtacccgctttcgcagatacgtgtacgaactggctttcaccgccccactcttccggcaggatgccgtactgggagagttcgttcttaacgcgatccggatcagcttctggtttatcgatcttgttcactgcaaccaccaccggtacctgcgccgctttcgcgtgctggattgcttcgatggtctgcggcatcacaccgtcgtcggcagcaacaaccaggactacgatgtccgttgcctgcgcaccacgagcacgcatactagtaaacgcggcgtgccccggggtgtccaggaaggtgatcatgccgttttcagtttcaacgtggtatgcaccaatgtgctgggtaatgccgcccgcttcgccagaggccactttcgtactacgaatgtagtccagcagagaggttttaccgtggtcaacgtgacccatgatggtcacaaccggcgcgcgcggttcagccgcagcacccgtgtcacggtcgctcattaccgcctcttccagctcgttttcacgacgcaggataactttatggcccatctcttcagcaaccagctgtgcggtttcctgatcgataacctggttgatggttgccattgcgcccagtttcatcatcgctttgatgacctgagagcctttaaccgccatcttgttcgccagttcgccaacggtgatagtttcgccgatcacaacgtcacggttaacggcctgagcaggcttctggaagccttgctgcaggctagaacctttacgttttccgcctttaccgccacgtactgctgcgcgtgcttcttcacgatcagctttactttcagcgtgtttgttgcctttcttcggacgcgctgctttcgcgttacgaccacggccacggccgccttcgacttcacgatcgctttcgtcttctgcctggcgagcatgttgagaagtagtgacgtgataatcgctggaatcttcagtcggttccgcgttatcagtccatttgttttcttccgccatacgacgtgcttcttcagcaacgcgacgtgcttcttcttcgagtttacgacgcgcttcttcttcagctttacgcttgagctctgcagcttcctgctcacggcgggctttttcagcctgggcgtttttagtcatatcgtcttgttgattgctcactttgtctttttccgcagcttcacgtttcgcttgttcagcagcttcacgcttagcttgttctgcggcctcacgttcagctttttgttgcgcctcgcgtttagcgctttcttctgcctcacgacgggcttgctcttccgcttcacgctgcgcttgctcttccgctgcaaggcgttcagcctcttgcggatcgcgtttcacaaaggtgcgtttcttgcggacttcgatttgtacgcttttgctttttccaccggtaccaggaatgttaagggtgctgcgtgttttacgttgcagcgtcaatttgtccgggccactatttttctgattcaggtggtcaatcaaagtctgtttctcttgtgcagacacagagtcgtcagcagacttccggatacctgcatcagcaaattgctgtaccaggcgttccacggaggtctgtcgctctgcggccagcgttttaatcgttacatctgtcatgctgttccttcctgctacagtttattacgcttcgtcaccgaaccagcaaatattacgggcagccataatcagtgctccggctttttcgtcggtcaacccttcgatatcagccagatcatcaatgccctgttcggcgagatcttccagcgtacaaacgccacgggcggccagtttgaatgccaaatcacgatctaccccttcaaggttcagcagatcgtcagccggtttgttatcaccgaggctttcttcctgggcctgtgcaatggtggccagtgcatttttagcacgctcgcgcagtgcttcaacggtcggctcatcaaggccttcgatttccaacagctctttcatcggcacataggccaattcttccagcgtgctgaagccttcttctaccagaacagtcgcgaagtcttcgtcgatgtcgagatatttggtgaaggtgtcgatcgctgcgtgcgcttccgcctgatgcttagcctgcaggtcgtcaacggtcatcacgttgagttcccaaccgctcagctggctagccagacgcacgttctgaccgttacggccaatcgcctgcgccaggttaccggcttcaacggcgatatccatggtgtgtttatcttcatccaccacgatagaagcaacgtctgccggtgccattgcgttaatcacgaactgcgccgggttatcatcccacaggacgatatcgatacgctcgccacccagttcagtagacaccgcctgaacacgcgcgccacgcatacctacgcaagcacctaccggatcgatacgtttatcgttggttttcaccgcgattttcgcacgagaacccggatcgcgagccgctgctttaatttcaatcacttcttcgccgatttctggcacttcaatacggaacagttcgatcagcatttccggcttggaacgagtgacgaacagttgcgcgccacgcgcttccgggcgaacggaatagagcacgccacgaacgcggtcgccagggcggaagttttcacgcggcagcatatcttcgcgcaggatcacggcttcagcgttgttgcccagatccagagagatgttgtcgcggtttacttttttcaccacgccggtgatgatttcaccttcgtgttcacggaactgatcaaccaccatcgcacgttcggcttcacgcactttctgcacgataacctgttttgccgtctgggtagtgatacggtcaaaggtaacagactcaatctgatcttcaacgtaatcgcccaggttcaggctttcatcttcataacgtgcggcttcaagggtgatttccttggtcggctgggtgacttcatcaacaactaaccagcgacggaaagtgtcaaaatcaccgcttttgcgatcgatctgtacgcggacgtcgatctcttgttcatattttttctttgttgctgtcgccagcgcgctttccaatgcttcgaaaatcttctcgcgaggtagcgccttttcattggatacggcttcaactacagccaaaatttctttgttcatcgcgggcttttcacctcatccagactattaaaagtggggaaccaggttcgccttctggatattactcagcgcgaacacttcatctttaccttcgacggtaactgtgatcatttcaccgtctaccgctttgataacgccctgccatttacgacggttttgtaccgccatacggagaaccagagtcacctcttctccgacaaaacgggcgtagtgttcagccgtgaacagtgggcgatcgagacccggactggagacttccaggttataagcaacggtgatgggatcttcaacatccagcacagcacttacctggtggctcacatcagcacaatcatcaacattgatgccatcttcactatcaatatagatgcgcagtgtggatgtgcgaccgcgaataaattcgatgccaaccagttcaaaacccagggcctcaactggcgcagtaatcatctctgttaatttttgctctaatgtggacaagcccacccccaagacataaaaaaagggcctaaagcccagttattctgtagtcagataacaaaaaaccccgataaatcggggctttatataactgaaccctataaccgcaactgcggtctggagcactttccagaaggattttttcaaatcccactacgaaggccgaagtcttcacagtatatttgaaaaaggactctaagggaaagtggttgcgggggccggatttgaaccgacgatcttcgggttatgagcccgacgagctaccaggctgctccaccccgcgcctgaaacgtggcaaattctactcgttttgggtaaaaaatgcaaatactgctgggatttggtgtaccgagacgggacgtaaaatctgcaggcattatagtgatccacgccacattttgtcaacgtttattgctaatcatgtgaatgaatatccagttcactttcatttgttgaatacttttgccttctcctgctctcccttaagcgcattattttacaaaaaacacactaaactcttcctgtctccgataaaagatgattaaatgaaaactcatttattttgcataaaaattcagtgagagcggaaatccaggctcatcatcagttaattaagcagggtgttattttatgacgacgattctcaagcatctcccggtaggtcaacgtattggtatcgctttttctggcggtctggacaccagtgccgcactgctgtggatgcgacaaaagggagcggttccttatgcatatactgcaaacctgggccagccagacgaagaggattatgatgcgatccctcgtcgtgccatggaatacggcgcggagaacgcacgtctgatcgactgccgcaaacaactggtggccgaaggtattgccgctattcagtgtggcgcatttcataacaccaccggcggcctgacctatttcaacacgacgccgctgggccgcgccgtgactggtaccatgctggttgctgcgatgaaagaagatggcgtgaatatctggggtgacggtagcacctacaaaggaaacgatatcgaacgtttctatcgttatggtctgctgaccaatgctgaactgcagatttacaaaccgtggcttgatactgactttattgatgaactgggcggccgtcatgagatgtctgaatttatgattgcctgcggtttcgactacaaaatgtctgtcgaaaaagcctactccacagactccaacatgcttggtgcaacgcatgaagcgaaggatctggaatacctcaactccagcgtcaaaatcgtcaacccgattatgggcgtgaaattctgggatgagagcgtgaagatcccggcagaagaagtcacagtacgctttgaacaaggtcatccggtggcgctgaacggtaaaacctttagcgacgacgtagaaatgatgctggaagctaaccgcatcggcggtcgtcacggcctgggcatgagcgaccagattgaaaaccgtatcatcgaagcgaaaagccgtggtatttacgaagctccggggatggcactgctgcacattgcgtatgaacgcctgttgaccggtattcacaacgaagacaccattgagcagtatcacgcgcatggtcgtcagttgggccgtctgctgtaccaggggcgttggtttgactcccaggcgctgatgctgcgtgactctctgcaacgctgggttgccagccagatcactggtgaagttaccctggagctgcgccgtgggaacgattatagtatcctgaataccgtcagtgagaacctgacctacaagccagagcgtctgacgatggaaaaaggcgacagcgtgttcagcccagatgatcgtattggtcaattgaccatgcgtaacctggatatcactgatacccgcgagaaacttttcggttatgccaaaactggcctgctttcctcctctgccgctagtggcgtgccgcaggtggagaatctggaaaacaaaggccagtaattcgacatcaaccctgcccttcaggggtggggttaccttgcttatcctctgtaaactcctttctgagcatcacataatcgaaaacatcatggtttgcatccacaacccgactgtctcctttatagtgtgcaatcacttcctcaagcgtttgcggctgttccggctttgttacccccatccacgcattaataaggtaattattgtaagctgtgctaaagatgttgttttccgttgtgcgatccacgccatccccaagaacggggctataccagataaacatcgggacatgatatgcctgctggctagcctccctgcctccatgaaaatagacgttcttcttcgtagggtcacgttccaggccgtggtcggcaaaatacatgacgctggcgcggcgatcttttaataattcaaaaacctgacctagcaaactatctgtgtaatgaatggagttgtcatagcaggcatcctgatcgtcctgcggttgaaacacggcgctggattgcggataggcgctacaagccggttcatggcttccatttaaatgaagaacaatcagtttcttttgctgcgtattttgctgtaatgcttggcttaaatgcggcaacaacaattcatcaaatcctctgacataaactgtttccatggcgcgcatggcgatactggtaactgctgtaccattctgccgaaaagcggattggctgcttagccagaaagtctgaaatcctgcttgattagccatattaataatgttgtcggggtaattatgaatgtcatgactcaaaacagaatcagcagttaaagaaaggggaacgctcagcgcagtgtaaggtgcgccgcttattgcttgattaaacagtttgatctgttttctttgtgcttcaacttgcggtgtcgtagagcgtgtatatccatacaaagacatattgtcgacacgtacagactcccccacaatcaacacgtaggtatcaatacctgtatccctgacacttaattgaaaatacggcaccgtgtttgcaatactgagtaatctttgatgctctttcgctgctaaagcaaaatagttgagattgaaaaacggcgtataggtagcaaatcggctcgctagtatatatggactgaacgcttttttattttttgcatctttataagcaaattgacaagcggaaaataaactgccgctaatgacaatcagcaataatattcctgtcactttttttgtcggcaaggaaacatcatattttattattactgccaaaaaaagaagggataaaaaagcaaaggcacatagataagggatatacatccccagcattttgacaacttcatccggatcactctggagcacactaatcgcaaatccatcattgaaagttgtaccaaaggtacaccaactatagaggctaatactcatgtctgccgcagtcagtaacacaaatggtgcggcaacaagcaggcgaagcggaagggaacttatacgttttacaaccaggatggtcagaacgaagaacagcaagcgctgaaccatatgcgctccggaagaagcgactaagttcgtaataccaaaaacaataacacaaagatacaacaaccaatgagatttaaaagttctagcaaatttgttgaatactgtcatccagaaatccaagttcacaaccaatataaacaattatcaacaatgtttaattttatatcagacatgtttttcaactctgatccatatcagaacgaaacactgttagttttttctttttaaatgatgcggccattgcgttctcagtaattaaataacattatcaatgcgtctctaaacattacgcagaacgtagccatcagtcgttatactgacaggagcaggatggtttatcgagaagtaaacatatccgtattcgtaccggaactggagttgacacaataaagtgccaattatgtcagtagaagggaaaaatttataactaaggcgtaccggcaccatcgtttcaaggtaccagctacgagtaaagcaactggacgagatacagatacctgacaaccattcctcagaccaggaccaaaacgaaaaaagacgcttttcagcgtctcttttctggaatttggtaccgaggacgggacttgaacccgtaagccctattgggcactaccacctcaaggtagcgtgtctaccaattccaccacctcggcacggatactactttttagttcgggatatcgctggtcggcttagccggagcagctggctgagtttgttcggttttcgccggtgcactcagattttcccattcgctacctttattggttttgttgctattgatgttacccagcaccagactgatgatgaagaataacgttgccagcagcgccgtcatgcgggtcatgaagttaccagaaccactactaccaaacagcgtagcggaagcgcctgctccgaaggaggctcccatatcagcgcctttaccttgctgcagcatgatcagaccaacaaggccaattgccacaataaggaaaactactaaaagagcttcatacataatcaacctgttccttgcggagttgccgcgtaccaatgcttcaaccaataaagcgggagtttttaatctttcccactgaagcgggtgtgaatactaaccaaagcgaatgaccttcgcaagggcaattttatcgcattgtatcaactgcggaaaaaaacagcaaaaccgatgtgttcgctgagaaaaaaggcgacaatcgccgcctttttagccagttatctaacgctttaaacggcttttactgcatcggcgatgcggtgtgcaaattcagtcacctgcgcttcgtcttcgccttccaccatcacgcgaattaacggttcggtgccggatttacgcagcaacacgcgtccacggttgcccagcgcagcttcaacctctgcggtcacggctttaacactctcatgctcaagtggatcgccgctacctgcggtgtaacgtacgttaaccagaatctgcgggaacattttcatgccgctgcaaaggtcgtgcaggctcatatggttacgtgccatcgccgccagcacctgcaagccagcaacgatgccgtcaccggtagtagttttatccagcaggatcacatgaccggaattctctgcaccgatacgccagcctttctcctgcattttttccagtacgtagcggtcacccactttcgcgcgcgcaaatggaattcctaactgtttcagcgccagttcaagccccatgttgctcatcaatgtacccacagcgccaccacgcagctggccctgacgaagaccttcacgcgcgatgatatacatgatctgatcgccatcgactttattgccttcatggtcaaccataatcacgcgatcgccatcgccgtcgaaggcaataccgagatccgctttttcagccagcacacgagcctggagcgcgcgaacgtcggtagcccccacttcggcattgatgtttacaccgtttggctcacaaccgatagcgataacgttcgcccccagttcgcgcagcacgttcggcgcgatgtgataagtcgcaccgtttgcacaatccaccacaatcttcagttcactgaggctaagttcgttcgggaacgtggctttgcaaaactcgatatagcgacccgcggcatcaacgatacggctggctttacccagttctgcgctatcaacgcagctgatctccttttccatttccgcttcgatggcctcttctaccgcatccggcagtttggtgccgtcgatagagaagaatttaatgccattatcgtagaacgggttatggcttgcagatatcacaattccggcctctgcgcggaaggtacgcgtcagataagccacggccggtgttggcatcgggccagtgaagagtgcggaaaggcccgctgccgccagacccgcttccagtgcactctccagcatatagccagaaatacgcgtgtctttaccaataataatcttacgggagccgtggcgcgccagcactttacccgcggcccaacccagcttaagcacaaaatcaggtgtgatcggcgcatcccctacacgaccacgaatcccatcggtaccgaaatatttacgattactcatagcgtttgttttcctttgcagacagagtggcttccaccacccgcatcgcttctacggtttctttgacgtcatgaacacgaatgatgtgcgcgccttgcattgcggcaatgaccgcacaggccagactaccgctcaggcgctcggacggccccacgttcagcagctgcccaatcatgctttttcgactcatacccaccaacagcggcaggttgaaatggtgaaattcagccaggcgcgccagtaaactatagttatgggagagatttttaccgaaaccgaatccggggtcgagcaacaatttctcttttgcgatacccgcctgctcgcaacgtgctatttgctcaataaagtagcgattcacttctgcaaagacatcgtcatacttcggagcttcctgcatggtttttggatttccctgcatatgcatcagacaaaccggtaaaccggtttctgcagccgcctccagagcgccaggttcggaaagggagcggatatcattaataatgtgagcgccaactttcgcactctcacggatgacttctggtttggatgtatcgacactgatccagacttcgaagcgttgagcaattgcctcaaccacaggaataacacgttgcaactcttcttcaacgctaacttccgccgcccctgggcgcgtggactcgccaccaacgtcaatgatcgtcgcgccagcgttgatcatcagattcgcatgtttcaccgcatctatcaggctgttatgcgtgccaccatcgctaaaggaatcaggcgtgacgttgaggatccccattacgtgaggatggctaaggtccagactagtaccctgggcaaagagtttcatgatgttatccctggtatgaattgataagaaaaaaccccggagcacgccccggggttttcggtacaaatacagtcatctgatgcgggaacttacttgtcgcctaactgctcactcatggtgttacccgggttcggcgtacgcggttcatcaaccggacgaggagcctttggactaccattgtcgccagaattgttagaagcgcctggttcttcccagcccgctggcggacgtacatcgcgacgtgccatcaggtcatcaatctgcggtgcgtcgatagtctcatatttcatgagagcatctttcatcgcatgcagaatatccatattgtcggtcagaagctgacgcgcacgattatagttacgctcaatcagtgctttcacttcctggtcgatgatacgtgcagtttcatcggacatatgtttcgctttcgctacgctacggccgaggaacacttcaccttcttcttccgcgtacagcagtggacccaatttctcagagaagccccactgagtcaccatgttacgtgccaggttggtcgcaactttaatatcgttggacgcaccggtagatacatgttccggcccgtagatgatctcttctgccagacgaccaccgtacagcgtagaaatctggctttccagtttctgacggctggcgctgattgcgtcgccctcaggcaagaagaaagtcacacccagcgcacgaccgcgtgggataatcgtcactttgtgcaccggatcgtgttccggcaccaggcgaccgataatcgcatgacccgcttcgtggtaagccgtgctttctttctgcgcttccgtcatcaccatggagcgacgttccgcacccatcatgattttgtctttcgctttctcgaactcaaccatgctcacaacgcgtttgttgccacgagcagcgaacagtgccgcttcgttcaccaggttcgccaggtcagcaccggagaaaccaggagtaccacgggcaatgattgccgcgtcgatatcgggtgccaatggtacgcgacgcatgtgaactttcaggatctgctcacgaccgcgaacatctggcaagccgaccacaacctgacggtcgaaacggccaggacgcagcagggccgggtcgagaacgtccggacggttagtcgcggcgataacgatgataccttcgttaccttcgaagccatccatctcaaccagcatctggttcagagtctgttcacgttcatcgtgaccaccgcccagaccagcgccacgctggcggcctacggcgtcgatttcatcgataaagatgatgcacggtgccgctttcttcgcctgttcgaacatgtcacgaacacgggatgcacccacaccgacgaacatttctacgaagtcagaaccggagatagtaaagaacggaactttcgcttcgcctgcaatcgctttcgccagcagcgttttaccggtacccggaggaccgaccatcaagacgcctttcgggatcttaccgccgagtttctggaagcggctcggctcgcgcagatactcaaccagttcagcaacttcttcttttgcttcgtcgcagcccgcaacgtcagcaaaggtcgttttgatctgatcttccgtcagcatgcgcgctttgctcttaccaaagctcatggcacctttgccaccgccgccctgcatttgacgcatgaagaagatccagacaccaatcagcaacagcatcgggaaccaggagatgaagatagaagccagcaggcttggttcttcaggcggttcaccgacaaccttgacgttcttggtcaacaggttatccagtaatttcggatcctgaaccggaatgtaagtggtataacggttactatctttcttggtaacgttgatttcacgtccgttgatacgcgcttcacgaacctggtcgttattgacctcttgtaggaaggtagagtaatccaccttacggccattagactcgctgggcccaaagctctggaatacactcatcagcacaacggcaatgaccagccagagtattaggtttttcgccatgtcactcaagggattaacctcttattacaactgtgttaaaaacagcgtcaggatactctatatccagcatctttcaaactttcgtctgaaatctcccggttagggtttacgcccggtcgctacaatatacacttcccggctacgtgcacgagaagagtccagcttacgaactttgaccttcgtaaacagggagcgaatttcccttagatactcatcgaaaccttcgccctggaacaccttcactacaaaactgccacctggcgctaatacatcacgacacatttctagcgccagttccaccagatacatggcacgggggatatccaccgccggtgttccgctcatgtttggtgccatatcggacatgacaacctggactttgctgtcgccaacgcgctccagcagtgctttcatcaccagttcatcacgaaaatcgccctgaagaaagtccacaccaacgataggatccataggtaaaagatcgcaagcgatgatgcggcctttgccgccaatttgggtgaccacatattgactccaaccacccggagcagcaccaaggtcgacaaccgtcattcccggtttaaagagtttgtcactttgctgtatttcatcaagtttaaaccaggcacgggaacgtaacccctttttctgtgcctgttgaacatatttatcgctaaagtgttcctgaagccagcggctggagctggcagaacgcttcttacctgtcatttaactttcccatggggataactcatcgtaaccaattgcgtaaatttttacgcgcctatttggtgatatatgggagatggcggtagaatgacccgttttcaatcccaacgtaagcaaaaaatacgatgaatctgagtactaaacaaaaacagcacctgaaaggtctggcacatccgctcaagccagttgttctgcttggcagtaatggtttgaccgaaggggtgctggccgagattgaacaagcgttagagcaccatgaactcatcaaggtgaaaatcgccaccgaagatcgcgaaactaaaaccttgatcgtggaagctatcgtgcgcgaaaccggcgcctgtaatgtacaggtcatcggtaaaacgctggtgctttatcgcccaactaaagaacgtaaaatcagcctgccacgctaagattatcctaaagttacacacatttgctgtgtaaaacgaggggttttccgcaggcaggagagcaaaatgccacgctctgttcgttgataaaaggccgcatagcggcctttttcctttctttacaatacatcaacatcttgagtattgggtaattcttacaggtattccaccttaattacttcaaattctacttcgccgcccggcgttttgatgaccacaacatcatcttcttctttgccgatcaggccacgagcaatagggctgtttacagaaatcaggttttgtttaaagtcagcttcgtcatcgccaacgatgcgataagtctgttcttcgtcagaatccagattcagcaccgttacggtagcaccaaaaataacgcgcccattgttgggcattttggtgacatcaatcacctgcgcgttgctcagcttggcttcgatgtctttaatacggccttcgcagaaaccctgctgttcacgagctgcgtggtattcggcgttttctttcaggtcgccatgctcacgcgcttccgcgatagcagcaatgatttcaggacggcgcacagatttcagaaaatccagctcttcgcgtaatttttcagcgccgcgtaaggtcatcggaatagcttgcatttgttatacctcttgaatattcctgatagggcaagtcttcacccaccccggctgttcggcctgcccggcataactccttaccgggaccagaagcaaaaaaataccgacccgggtacaagtcccaggtcagctacaattcacattttgatagtcattttaccctgaagttcccgaagggtcatcgtttactttatagggcgttgcgccgtagtatgacggctcgattccaggttgttagcgcgagattatgcgattttccagatttatcatcggattgaccagctgtatagcgttcagtgttcaggccgcaaatgttgatgagtacattactcaactccccgctggtgccaaccttgccctgatggtgcaaaaagtcggcgcgagcgcccccgctattgattaccacagtcagcagatggcgctgcctgccagtacccagaaagtgattactgcgctggcggcgttgattcaactcggccccgattttcgttttaccacgacgcttgaaaccaaaggcaatgtggaaaacggcgtacttaagggtgacttagtggcgcgatttggtgccgatccgacgttaaaacgtcaggatattcgcaatatggtcgcgactttgaaaaaatctggcgtcaaccaaatcgatggcaatgtgttgatagatacctccattttcgccagccacgataaagcccccggctggccatggaatgacatgacacaatgctttagcgctccgcctgccgccgccatagttgaccgcaactgtttctccgtcagcctctacagtgccccaaagcctggtgatatggcttttatacgcgtggcatcttattaccccgttacgatgttcagccaggtacgcaccctcccccgtggttctgccgaagcgcaatactgcgaactggatgtggtgccaggcgacctgaaccgctttacgctgacgggatgcctgccacaacgttctgagccgctcccgttggcttttgccgtgcaggatggagccagctatgccggtgcaattctgaaagatgagttaaaacaggcgggtatcacctggagcggaacactgctgcgccagactcaggttaacgaacctggaacggtagttgccagtaaacagagcgccccgctgcacgatctgcttaagattatgctgaaaaagagcgacaacatgatcgccgatacggttttccgcatgataggccatgcgcgcttcaatgtgcctggaacatggcgggccgggagcgacgccgtgcgtcagatcctgcgccagcaagccggtgtcgatattggaaacaccattattgccgatggtagtgggcttagccggcataacctgattgcccccgccaccatgatgcaggtgctgcaatacattgcccaacacgacaatgaacttaactttatctccatgctgccgctggcgggctatgacggctctttgcagtaccgtgcaggtctgcatcaggcgggcgtggatggaaaagtcagtgcgaaaaccggtagcttgcagggggtatataacctggcgggattcattaccacagcgagcgggcaacgaatggcgtttgtgcaatatctttctggctatgcagtagaacctgcggatcagcgtaatcgccgtattccgttagtgcgttttgaaagccgtttgtataaagatatttatcagaacaattaatcaaaaagaaaccccggcacatggccggggcttcagattattgacaaagtgcgctttgtttatgccggatgcggcgtaaacgccttatccggcctacaaaatcgtgcaaattcaacatattgcaattctcttgtaggcctgataagcgtagcgcatcaggctgatttggcgtttatcatcagtgattaacgcttgtaaatgaactcaacgccttcttcgtcgtcttcgtcccagtcgtcatcccagtcttcatcatcctcttcagcaatctcttcaagctgctggcgatgataatcatcccacatgaattcgactttctctggctgtttcgcttcttcagcctgcacgaccgggttttcaatgataaaggtcatcacatcccagcagagatctttcacgcccagtccactcgccgcagagatcagataatatttatcttcccagcccagcgcctcagcgatcgctttcgctttctcttcggcttctaccttatccagcagatcgatcttgttgaacactaaccaacgcggtttcgtcgccagatcctggctgtatttttccagctcgctgataataatacgcgcgttttcaaccggatcggtgccgtcaatcggatcgatatcgatgaggtgcaacaggacgcggcaacgttccaggtgcttcaggaagcgaatgcccagacctgcgccttccgcagcgccttcaatcagtcctggaatatcggcaacaacgaagctcttttcgttgtccattcgtaccacacccagacttggcaccagagtggtaaacggataatccgccactttcggtttagccgcgcttaccgcacgaataaaggtgcttttacccgcgtttggcatccccaacataccgacgtcagccagcagcatcagctccagcagcagctcgcgcttatcgcccggcgtgccgttggttttctgccgcggtgtacggttaacggagcttttgaaacgggtattgcccagaccgtgccagccgcccttagcaaccagcagacgctgaccgtgtttggtcatatcgcccatggtttcaccagtaccctggtcgattacacgcgtacctaccggcactttaatcgtcacgtctttaccgcgcttaccggtacagtcgcggcttgcgccattctgaccgcgctctgcacggaaagatttttcaaaacgataatcgataagcgtgttcaggttctcgtcggcttccatccatacgtcaccaccatcaccgccgtcgccgccatccgggccgcctttcggaatatacttttcgcggcggaagctcacgcaaccattaccgccatcacctgcaacgaccagaatgcttgcttcatcaacaaacttcattttattctccgtaaatcattcgcctgcgcggggttggcttaccaccgttgtatgcttacgtaatccgccccaaatacgatgaccaatggcggaatacatcgcgcccgcaaccacgacaaacgcaccgagataacctaaaaggtttaacatcggtctggcgaagaaatcgggccaggccagacttaaaagatcactaaaaaacagcgtaaacagtggggtgagcgtgatgatcgcgctcacctgcgctgcctgccagcgagccatcgcttccgccagggcgccatatcctaccaaggtattcagtccgcaaaaaattaaacatgcgagctgccagtggctaagctgcgctatcactccaggctttgccagagggaagagcgcaattgtacataaagtgtacagtaaaaacaggatctgcggactggccagccgacgcaataaaaccttttgcgccacgccataactcacccaaaccgtcgccgcaccgaccccaaagataactccccaggtgtaatcggtgagctttgtaaatatctcgaccagactggtgttaaaaaacatcaccaggccgctcaggagcatcaatgcccctacaacctgagtgctgcgcattttctctttgaggataaatacgctggcaaccatcatgccaactgggctgagttgcccaatcacctggctagcggtcggactcaggtattgcaaggaactgctgaacaggatgaagttcccaaacagcccggcggtcgccactgccaacaaaatcaaccagcgtggcttacgaaacacgcgtaatggcggcaacctcttcttcaccgcaagaatggcacccaggccaatactcgccatcaagaaacggtaaaacacgattgtcggaggttccatcacctccagcacctgcttcattgcgattggcaacgccccccagcaaattgctgtggtgagcgccaaaagaatgccaatgcctgcctgctgcttcataccgtattccctgcaaagcgcatttgcggattaacgtcgcaccatgcgcatttttaccggttatcgaatgtaaaaagccccgcaacgtgttgcggggctttcatccgttaccgggacgcgaaaaacttattcagcttcgatgctgataaatttacggtttttcgggcctttaacttcgaatttcactttaccgtctgctttagcaaacagagtgtggtcacgaccgcaacctacgttagcgccagcgtggaatttggtaccacgttgacgaacgatgatgctacccgccagaacggattcgccaccgaaacgcttaacgcccaggcgtttagcttcactatcgcgaccgttacgtgtggagccgccagcctttttatgtgccatttgaaatctctcctcaggtcttaggcgctgatgccagtaattttcacatcagtgaaccactgacgatggccctgctgcttacgatagtgtttacgacgacgaaacttaacgattttaactttctcgccacgaccgtgagcaacaacttcagctttgattacgccgccatcaacgaaaggaacgccgattttgacttcttcaccgtttgcgatcatcagcacttcagcgaactcaacagtttcgccagttgcgatgtccagcttttccaggcgaacggtctgaccttcgcttactcggtgttgtttaccaccactttggaaaaccgcgtacatataaaactccgcttccgcgcacaccttttcaatgattcagagtgcgctataaatattcacaatagggcgcgaatattacgcaaaacgcacgcctttgacaagtgctacagtcaatacacgaagaaaaaaaacacaacttgtacggtaacgtttatctgtgccattttttcagtacaatcaccctatattcctaaccataaaccctaagttgcctttgttcacagtaaggtaatcggggcgaaaagcccggcttttgcgatgaatttagaaaaaatcaatgagttaaccgcgcaagatatggcgggtgttaatgcggcaatccttgagcagcttaattccgacgtccaactgatcaatcagttaggctattacatcgtcagcggcggcggtaaacgtattcgtccgatgattgctgtactggctgcacgagctgttggctatgagggaaatgcgcatgtcaccattgctgccctgatcgagtttatccacacggcgactctgctacacgacgacgttgtggatgaaagtgatatgcgcaggggtaaagctaccgccaacgccgcatttggcaatgccgccagcgtgctggtaggcgattttatttatacccgcgctttccagatgatgaccagcctcggtagcctcaaagtgctggaagtcatgagtgaagccgtaaacgtcatcgcagaaggtgaagttctgcaactgatgaacgttaacgatccggacatcactgaagaaaactacatgcgcgttatctatagcaaaaccgcgcgtctgtttgaggctgccgcgcagtgttccgggattctggctggctgtacgccggaggaggagaaaggcctgcaggattatgggcgctatctcggcactgctttccagttgatcgacgatttactcgattacaatgccgatggcgaacagttaggtaaaaatgtcggcgacgatctgaacgaaggtaaaccgacgctgccgctgctgcatgcgatgcatcatggcacaccagaacaggcacagatgatccgtaccgccatcgaacagggtaacggtcgccatcttctggaaccggttctggaagcaatgaacgcttgtggatctcttgaatggacgcgtcagcgtgccgaggaagaagcagacaaagccatcgcagcgttacaggtgctcccggacaccccttggcgagaagcactcatcggcctcgcgcacatcgctgttcaacgcgatcgttaatcccctcccctcatcccgcgcagcgcgcgggatggttccagtaagttccataaaaacacttattcagctctataacacctgaaaaatagggatgtgcatctttatatattctgaatattcacactctttacaggaactttttagagcaataggccatcaggagtatagtgatgctcgacagaagaagtgttctgaatgaaagcgactaacttaaggagtgaggaaaaatggaaagtaatttcattgactggcatcccgctgacatcattgcgggtttgcgcaagaagggaacgagtatggcggcggaatctcgcagaaatggtttgagttccagtacgctggcgaatgcattaagccgcccatggccgaaaggagagatgattattgcgaaagccctgggaactgacccctgggttatctggccaagtcgctaccatgatccgcagacccatgagtttatcgacagaacgcagttgatgcgtagctacactaaaccgaaaaaatgagtggtctggcggtagccccgcgaacggggctgccagctctcagacgattattcgcctttcacacgctcaatatttgcacctaaagcgcgcagtttgtcttcaatgcgttcgtagccacgatcgatgtgataaatacgatcaaccaccgtcgtcccttccgcaatacagccagccagcaccaggcttgcacttgcacgcagatcggttgccataacctgtgcgccagaaagtttttcaacaccgtgacaaataacggtattgctttcgatttcggcgtgcgcgcccatacggctcagctctggcacatgcataaagcggttttcaaagaccgtttcggtgataaacccggtcccttctgccaccaggttcaacagcgtgaactgggcctgcatatcggtcgggaatgccggatgcggcgcggtacgtacgttaacagccttcggacgtttgccatgcatatccaggctaatccagtcttcgccgacttcgatgtccgctccagcgtcacgcagtttcgccagcacggcgtcgagagtatctggctgcgcgttacggcagataattttgccgcgagaaatcgccgccgccaccaggaaagtaccggtttcgatacgatccggcagaacgcgatagacaccgccgcctaaacgttccacaccttcgatgacgatacgatcggtgccctgaccgctaattttcgcacccagcgtaatcaggaagttcgcggtatcgacgatttccggttcacgcgctgcgttttcaataatcgtggtgccttccgccagggttgcagcacacatgatggtcaccgttgcgccaacgctgactttatccatcacgatatgtgcacctttcaaacgaccatcgacggaagctttaacgtaaccttcttccagtttgatggtcgcgcctaattgttcgaggccagaaatgtgtagatcaaccggacgcgcaccgatcgtacaaccgccaggtagactaacttgcccctgaccaaagcgcgctaccagcggccccagcgcccagatagaagcacgcatggttttaaccagatcgtaaggtgcgcagaatacattaacgtcgcgggcatcaatatgcacagaaccattacgttctactttcgcacccagctggcttagcagcttcatacttgtatcgacgtctttcagtttcgggacgttctggatctctaccggttcttccgccagtagtgcggcaaaaaggataggcagagcagcatttttagcgccggaaattgtgacttcgccctggagcttcgttggcccctgaacacgaaatttatccatttagtttgttctcagttaacaattcatatccgctaccggcgaatcgcccatagctcaaaagccgttcagtttgcgatcgcgcgcccactccgcaggggtatacgctttgatgctcacagcatgaatgcggttatccgcaatatattccatcagcggaccatagaccgtctgctgttttttaacccgactcatgccgtcaaacaactcacccacggcaataacctgaaagtggctgccatcgccggaaacgtggacttcctggagggagagagcgttcatcaacacgctctgaatttcattattttccatgggatcttcaatcatcagttaataaaccagcgaaacatcttagagcaaagttgcgctggcataaataagcaaaaagcctcgctgataaatcagacaaggctcgacttgcaggcaggtttgccggacaggcggttaacgccatatccggcctgaaaaaatttaacgaggcagaacatcagcaggcaaattatacaatttcgccagggtatacactttgtcgtttaccccctgaagcgtcacattgttgccctgctttttcgccagatcgataagatggagcagcagtgccagtccccccgtatccacgcgggagacacggctaagatcgatgcaggtaatccccttcaccgcttcctcacgcatttcccaaagcggtagcaaaacgtcctgatccagctctccggataacgccagcgtgtcacccgtctgcatccagctcagactctcgctcattattttttctcttccagagtgattttctgttgagaaatgcttttcagttgcgcagtcaggccgtcgatacctttggtacgcagcagcgttccccactcgttttgtttggtggtgatcatactgacgccttcagcaatcatgtcgtaagcctgccaattgcccgtctgggagtttttacgccactggaagtccagacgcaccggcggacggccattcgggtcaataatggtaacgcgaataggcacaatggttttatcgcccagcggctgttctggcgcaatctgataggtttgaccgtgatacatcgccagcgcctgaccgtaagcctgcttcaggtactcacggaaagcggcaaagtaggcttcacgttgagcaggggtcgcactcttgtaatactggcccagcaccagcgcaccggcgtatttcacctgtacgtatggcagcagttcctgatcaacaatggtacgcagataatccgggttggcccgaatttgcggttgctcattcttcaggcgatcgaacgttttctgcgccgcctcgtccatcagcttatacggattggtctggtctgccgcggttgccgcactcagaggtgcaatcaccagcaaagcgaccatcattaaacgtttaaacatgcgtcggttctcctgaaattatttcgttgtacccacaggttcagtggtttcattattacctggcgcagcagctggcgcatcgccactattcttattgtcatcgcctttactaccgtaaaggaactgaccaatgagatcttccagcaccatcgcagacttagtgtcctgaattgtatcgccatccttcaggatagcagtccccagttccgggtcttcaaaaccgacgtttaatgccagatattgttcccccagcaggccggaagtacgaatgctcaggctactggtatctggaatgtggttataacgttgttcaatttccagcgttacgcgcggcagataggttttcgggtccagcgtaatatccgccacccgacccacaacaacgccaccaatactgaccggagagcgcgctttcaggccgccaatgttatcgaacgtcgcataaagcgtgtaggtcggttcagtacgtatggacgtcacgttcgccgccttcaggcaaacaaacagcgccgccagcagtgctgctaataaaaagatacccacccaaatttcattttttttcgtttgcatgaactcaattcccaaacatcaatgcggtcagcacaaaatccagccccagaacagccagagagctgtggacaacggtgcgagtggttgcccggctaatcccggcagacgtcgggatggcgtcgtagccgttaaacaagctaatccacgtcaccgtgatggcgaacaccacgctcttaatcagacagttgaccagatccatacgccagtcgacggcattttgcattgcgctccagaagaacccgctatcaatgcctttccaactgacgccgaccagagatccgccccagatccccacggcgacgaaaataaccgtcaacagtggtaaactaataaccccagcccagaaacggggagaaataacccgacgcagcggatccaccgccatcatctccatactggagagttgctctgtagcgcgcatcaggccgatttctgcggttagcgcgctaccagcacgcccggcaaacaacaacgcggcaaccaccggccccagttcacgcagtaggcttaacgccaccagcatacccagactggtttccgcactataagtggtcagaaccagataaccttgcagccccaacaccattccgatgaacacgccagaaaccacaataatcagcatgctcaggacgccgacattatagagctggcgcaccagcagcggcgcatgtttgcgaaattccggtttgccgaccagcgcattgaataacattaacccggcccgcccgaacgttctcagggttttaatccctttatgtccgaggctcgccagcgcatttaacagcatgagtggcttaactccctggtaaaagatcagcgtgataatcgccggcaggatagcggaacggaacaggcccgtcagctatcccgtccagaaactgacgtacgcgcggatcaggattcgcctgcaacgcctgggcactgccatgagcgacaatttttttgtccgccaggatccaggcgtgatccgcaatacttaacacttccggcacatcgtgagaaaccaccacacaagtcacgcccagcgcgctgttcagctcagaaatcagcttcaccagtacgcccatggtgatgggatcttgcccaacaaaaggttcatcaaacatgatgagatccggctccagcgcaatcgcacgcgccagcgctgcacgccgcgccatcccaccggaaagttcagaaggcattagtttagccgctccacgcagccccacggcctccagcttcatcatcaccgtactatgcaacaatggcgcgggaagttgggtatgttcgcgcagtggataggcgacgttgtcaaatacgttcatatcagtgaacaacgccccggactgaaataacatgctcatccgtttgcgcactgtatacaggcggctacgagacatcgccggaatattctcaccatcgaaaaggatctcaccatgatctggtgcgatttgcccgccaatcagacggagtagcgtcgttttaccgatgccgcttggccccatgatcgccgtgatcttccctcgcggcacggtcagggaaatattatcgaagatgcagcgattgccacgcgtaaaactgacatcgcgcatatcgactaaattcgccacagactgctccataattcacccttcgtcttgcgttgattttctaagcatggcgctcaatttaaccttgaacccaacatatttacagaatattacccgccgtggttagcgaaagctggcatttgttttactttttagccgcataaagtcaaaattaagcatccgttacggctttctgaaaatcttcagcggaccggcgagtatacctgaagaaaggacgttagatgcttttagctacggcactgttaattgttggtttacttttggtcgtttacagtgccgaccgcctggtttttgccgcgtctattctttgccgaacctttggcatcccgccgctgatcatcggcatgacggtggtcagtattggtacaagcttaccagaagtcatcgtcagccttgccgcgtctctgcacgaacaacgcgatttagccgttggtacagccctcggcagtaacattatcaatatattgctgatcctcggtctggctgcgctggttcgtccttttaccgtccattctgatgttctacgccgtgaattacccttaatgttgttggtcagcgtggtggccggttccgtactctatgacggacaacttagtcgcagcgatggtatctttctcctctttctggctgtgctatggctgctgttcattgttaaacttgcacgtcaggctgaacgtcaggggactgacagcctgaccagagagcagcttgcagagctgccgcgtgacggcggattgcccgtcgcgtttttatggctcggcattgcgcttatcatcatgccagtggccacgcggatggtggttgataacgccacggtgctggcgaattactttgccatcagcgagttgacgatgggtctgacggcaattgctatcggaaccagcctgccggaactggcaaccgcaatagcgggggttcgcaaaggtgaaaacgacattgctgtcggaaatatcattggcgcaaacatttttaatattgtcatcgtgttgggtttacccgcgctgataacgccaggagagattgatccactggcgtacagtcgtgactacagcgtgatgttgctggtgagcattatttttgcgttgctgtgctggcggcgctccccgcaaccgggccgtggtgtaggggtattattaactggcggatttatcgtatggctggcgatgttgtactggttaagcccaatactcgttgaataactggaaacgcattatgagccacgtagagttacaaccgggttttgactttcagcaagcaggtaaagaagtcctggcgattgaacgtgaatgcctggcggagcttgatcaatacatcaatcagaatttcacgcttgcctgtgaaaagatgttctggtgtaaagggaaagttgtcgtcatggggatgggaaaaagcgggcatattgggcgaaaaatggcggcaacgtttgccagcaccggtacacctagttttttcgtccatcctggtgaagccgcgcatggtgatttaggcatggttaccccacaggatgtggtgattgctatctctaactctggtgaatccagcgaaatcacggccttaattccagtgcttaagcgtcttcacgtaccgttaatctgcatcaccggtcgcccggagagcagcatggcgcgcgccgcagatgtgcatctgtgtgttaaagtagcgaaagaagcctgtccgttagggctggcaccgaccagcagcaccaccgccacgctggttatgggcgatgccctcgctgtcgcgctgttaaaagcacgcggctttactgctgaagattttgcgctcagtcacccaggcggcgcactgggtcgtaaacttctgctgcgcgtaaacgatattatgcatacgggcgatgagatcccgcatgttaagaaaacggccagtctgcgtgacgcgttgctggaagttacccgcaaaaatcttggtatgactgtcatttgcgatgacaatatgatgattgaaggcatctttaccgacggtgatttacgccgtgtcttcgatatgggcgtggatgttcgtcagttaagtattgccgatgtgatgacgccggggggaatacgtgtgcgccctggcattctggccgttgaggcactgaacttaatgcagtcccgccatatcacctccgtgatggttgccgatggcgaccatttactcggtgtgttacatatgcatgatttactgcgtgcaggcgtagtgtaaagattcaaggataaacaacaatgagcaaagcaggtgcgagccttgcgacctgttacggccctgtcagcgccgacgttatagcaaaagcagagaacattcgtctgctgatcctcgatgtcgatggcgtactgagtgatggcctgatttatatgggcaataatggcgaagagctgaaagcgttcaatgttcgtgacggttatggcattcgttgtgcgctcacctctgatattgaagtcgctatcattaccgggcgaaaggctaaactggtagaagatcgttgtgccacattggggatcactcacttgtatcaggggcagagtaacaaactgatcgcctttagcgatctgctggaaaaactggcgattgccccggaaaatgtggcttatgtcggcgatgatctcatcgactggccggtaatggaaaaagtgggtttaagcgtcgccgtggccgatgcgcatccactgttgatcccgcgcgccgattacgtgacgcgcattgctggcggtcgtggcgcagtgcgcgaagtttgcgacttattactcctggcgcagggcaaactggatgaagccaaagggcaaagcatatgagtaaagccagacgttgggttatcattgtgctaagtctggcggttctggtgatgatcggcattaatatggccgaaaaagacgataccgcccaggtggtcgtcaacaacaatgatcccacctataaaagcgagcatacggacacgctcgtctataacccagaaggggcactaagctatcgattgattgctcaacacgttgaatattattccgatcaggccgttagctggtttacgcagccggtacttaccacgtttgataaggataaaatcccgacatggtccgtaaaagcagataaagccaagctgaccaatgaccggatgctctatttatatggacacgttgaagtcaacgcacttgtgccagactctcaacttcgcagaatcacgacggataacgcgcagatcaatctggtgacgcaggatgttacctctgaagacctcgtcacgttatacggaacaacatttaactccagcggtctgaaaatgcgcggcaacttacgcagcaagaacgccgagctgattgaaaaggttagaacatcctatgaaattcaaaacaaacaaactcagccttaatcttgtgcttgccagcagtcttctggccgccagcattccggcatttgccgtaaccggagacactgatcagccgatccacattgaaagcgaccagcaatctcttgatatgcaaggcaacgtggttacctttaccggtaatgtcatcgtcacccagggcaccatcaaaattaatgccgacaaagtggtcgttacccgtccgggcggcgaacaaggtaaagaagtgattgacggctacggtaaaccggcaacgttctaccagatgcaggacaacggtaaacccgttgaaggtcacgcttcccagatgcactacgaactggcaaaagattttgtcgttctgacgggtaatgcttatctgcagcaggtcgatagcaacattaagggcgataagatcacttacctggtgaaagagcagaaaatgcaggctttcagcgacaaaggcaagcgcgtaacaaccgttctggtgccgagccagctgcaggacaaaaacaacaaaggccagaccccggcacagaagaagggtaattaattcgttatggcaacattaactgcaaagaaccttgcaaaagcctataaaggccgtcgcgtggtagaagacgtcagcctgaccgtcaactccggggaaattgtcggtctgctggggccaaacggtgccggtaagaccaccactttctacatggttgtaggcattgtgccgcgcgatgcgggcaacatcattattgatgatgacgatatcagtctgctgcctctgcatgcacgcgcgcgccgcggtatcggctatctgccacaggaagcctccattttccgtcgcctcagcgtttacgataacctgatggcggtactgcaaattcgtgacgacttgtctgctgaacaacgtgaagaccgcgcgaacgagctgatggaagagtttcacattgagcacctgcgtgacagcatggggcagagtctctccgggggtgaacgtcgccgtgtagaaattgcccgcgcactggctgcgaatccgaaatttattctgctcgacgaaccgtttgccggggttgacccgatcagcgttatcgacattaaacgcatcattgagcacctgcgcgacagcggcctgggcgtgctgatcactgaccacaacgtgcgtgaaacactggcggtttgtgaacgcgcttatatcgtcagtcaggggcatttgatcgcccacggcacgcctacagaaatcttacaagacgaacacgttaagcgtgtataccttggggaagacttcagactctgatagggtagaagtttgcgacgttttagcaggagagtacgattctgaacatgaagcaaggtttgcaactcaggcttagccaacaactggcgatgacgccacagctccaacaggcaattcgtctgttgcagttgagcacgctggaacttcagcaggagctacagcaggcgctggagagtaatccgctgcttgagcaaatcgacactcatgaagaaatcgacacccgcgaaacgcaagacagtgaaacgctggacaccgccgacgcgctcgaacaaaaagagatgccggaagagctgccgctcgatgccagttgggacaccatttacaccgctggtacaccatccggcaccagcggtgactacattgacgacgagctgccggtctaccagggcgaaacgacgcagaccttgcaggattacctgatgtggcaggttgagctgacaccgttttccgacactgaccgcgctattgctacctctatcgtcgatgccgttgatgaaaccggttatctgactgtcccgctggaagatattctcgaaagtataggcgatgaagagatcgacatcgacgaagttgaagccgtccttaagcggatccaacggtttgatccggtcggtgtggcggcaaaagatctgcgtgactgtctgctgatccaactctcccaattcgataagaccacgccgtggctggaagaggccagactgatcattagcgatcatctcgatctgttagccaatcacgacttccgcactttaatgcgcgtcacgcgtctgaaagaagatgtgctgaaagaagccgtcaatctgatccagagcctcgatccgcgccccgggcagagcatccagactggcgaacctgagtatgtcattccagatgtgctggtgcgtaagcataacggtcactggacggtagaactcaacagtgacagcattccgcgtctgcaaatcaaccagcactacgccagcatgtgcaataacgcgcgcaacgatggtgacagccagtttatccgcagcaatctgcaggatgccaaatggttgatcaagagtctggaaagccgtaacgatacgctactgcgcgtgagtcgctgtatcgttgaacagcagcaagccttctttgagcaaggtgaagaatatatgaaaccgatggtactggccgatatcgcccaggctgtcgaaatgcatgaaagcacgatatctcgcgtgaccacgcaaaaatacctgcatagtccacgaggcatttttgaactgaagtatttcttttccagtcacgtcaataccgagggcggcggcgaagcttcctccacggcgattcgtgcgctggtgaagaaattaatcgcggcggaaaacccagcgaaaccgttgagcgacagcaagttaacctctttgctgagcgaacaaggtatcatggtggcacgccgcactgttgcgaagtaccgagagtctttatccattccgccgagtaaccagcgtaaacaactcgtttgacccaaccgataaggaagacactatgcagctcaacattaccggaaataacgtcgagatcaccgaggcactgcgcgaatttgttacagccaaatttgccaaacttgagcaatattttgaccgaatcaaccaggtctatgttgttctgaaagtggagaaagtcacccacaccagtgatgcaacactgcatgtaaacggtggtgaaattcatgccagcgcggaaggtcaggacatgtacgctgccattgatggcttaattgataagctggcacgccagttgaccaaacataaagataaactgaaacaacactaattgtccgggcaattagcatgtgcatggcggtctgttgtgcggcacaacgggccatttgtacggttaatgctccgagcctgttccactgtttgagtgggcaggttcttaggtgaaattatgacaaataatgatacaactctacagcttagcagtgttcttaacagggaatgtacgcgaagccgcgtccactgtcagagcaaaaaacgcgccctggaaatcatcagcgagctggcggcgaaacaacttagcctgccgcctcaggtggtttttgaagctatcctgacgcgggaaaaaatgggcagtaccggtatcggcaatggtattgccattccgcatggcaaactggaagaagatactctgcgcgccgttggcgttttcgttcagctcgaaacgcctatagctttcgatgccatcgacaaccaaccggtggacttactttttgccctgctggtgccggcagaccaaactaaaacgcacctgcatactctgagcctggtggcgaaacgtctggcggacaaaaccatctgccgccgtttacgcgcagcccagagcgatgaagagctgtatcaaatcattacggataccgaaggtactccggatgaagcgtaattattcggtaatgtctcttttagacgttgtgaggagaaacagtacatggtactgatgatcgtcagcggacgtagtggtagtggtaaatctgtcgccctgcgtgcgctggaagatatgggtttttactgcgtggataaccttcccgtagtgttgttacccgatctggctcgaaccctggccgatcgcgagatttctgccgccgtcagcattgatgttcgtaatatgccggagagtccagaaatattcgaacaggcgatgagtaacctgcctgacgctttcagtccgcaactcctgttcctggatgccgaccgtaataccttaattcgtcgttacagtgacacgcgccgactgcatccgctttccagcaaaaacctgagcctggaaagtgctatcgacaaagaaagcgatttgctggagcctctgcgtagccgagcggatctgattgtcgataccagtgaaatgtccgttcacgagctggctgaaatgctgcgtacccgtctgctgggtaaacgtgaacgcgaactgaccatggtctttgagtctttcggcttcaaacacggtatccctatcgatgcagattacgtctttgacgtgcgcttcttgccgaacccgcactgggatccgaaactgcgtccaatgacaggtcttgataaacctgtcgccgcgttcctcgaccgccacacagaagtacacaattttatctaccagacgcgaagctatcttgagctatggttacctatgctggaaaccaacaaccgtagctacttgacggtcgccattggttgtaccggcgggaagcaccgtagcgtgtatattgcagagcaactggcagactacttccgcagccgcggtaaaaacgtccagagtcgccatcgtacgctggaaaaacgtaaaccatgaccgtcaagcaaactgttgaaatcacaaacaagctgggcatgcatgcccggcctgcaatgaagctgtttgaattaatgcagggttttgacgctgaagtgctcttacgtaatgacgaaggcaccgaggctgaagccaacagcgttattgcgctgctgatgttggattctgccaaaggacggcagattgaagttgaagcgaccggtccacaggaagaggaagcactggccgccgttatcgccctctttaattctggttttgatgaagattaatcttcatcactttgacatacaactcccttcaaactccccccgacaataagaaaatcacgtactgaaatcgttctcaatcaacgtcatttgtacattttgtgcgcttttcactttcagaagaaccttaagaaaaccttaagaggcattgtttaggttttgtttaagttaatcgaccatactggagatcgtcagaaaatatttccaggagatggcatgattcgcttatctgaacaaagtcccctgggcaccggaagacatcggaaatgttatgcgcatccggaagatgcccaacgctgtatcaagattgtctaccatcgtggcgatggtggcgataaagagatccgccgtgagttaaagtactacgcgcatcttggtcgccggttaaaagactggagtggaataccgcgctatcacggtaccgttgagacggattgcggaaccggttatgtctacgatgtgattgcagattttgacggcaagccttccattacgctgaccgaatttgctgaacaatgccgttacgaagaagacattgcacaactgcgccagctactgaaacagctgaagcgttatttgcaggataaccgtatcgtgacgatgagcctgaagccgcagaatatcctctgtcaccgcatcagtgagagtgaggttatcccggtcgtctgcgacaacattggtgaaagcacattgattccactggcgacctggagcaagtggtgttgtctgcgtaagcaagagcggttatggaaacgatttatcgcccaaccggcgctggctattgccctgcagaaagatctgcaacctcgtgagagcaaaacgctggccctcactagccgcgaagcttaatccagctggtgttgttgcataaacggctcaccgcctaactgatacatctgccgtaaaatccacgcctgacggctacgcacgtagccgcttgggctggagactttgaaacgaagtggattaggtaatacagctgccagtaatgcagcttcgctccgggtaagtttgctcgcgggtttgtggaaataacgttgtgccgcagcttcgacgccaaacacaccgtcgccaaattcggcgatattcaggtaaaccgtcaggatacgctttttgctccagaccgtttctatccccagcgttaatccggcttccagcccttttcgaacccagctacgcccatcccataaaaagagatttttggctgtctgttgagaaatcgtactagcaccgcgaatacggttttcattgcgctcgttgtgcgccagggctttctcaatggaagcgacatcaaagccccagtgctcaggaaatttctgatcttctgcggcaatcaccgccagtcccatccacgggctgatttgatccatactgacccagtcagaatgtgccacgtaacgaaaattgccatgcagccaggcgctgacctgtcgctcgaccattaccgcactgaagggaacaggcgcaacgctaaacaacgcgatgcccccgccccagaaaacggcgaggacaaccattaaccgcaaaagaaaacggcgaacgaaactaaacaccgttaagcggcttttactcattcagccagaaccagcacgcgggaaaccagcttatcaatgccgctcgccgcttctgcaatgttctgcgccagcatatatgctggggtggtgacaatcttattgtcttcatcaaccacgatatcatcgacaggacacggcacatgctccgcgcccatctcttccagcacttctgcggtatcgatatcagtaccgatggtcaaacgcagcgggaaatcgaaaattttcggcagcatcgccggggcaatacacataaaaccaagcggttttccggcctgatgcatcgcttgtgccagcgcctttaattcacggtcaacggtgcattcgctaccaagactggcaaaattgcttaaattcttcgccgcgccaaacccccccggcacaatcaacgcatccagttcagcggcatcggcctgggccagaggacggatttcaccgcgcgttattcgtgccgcttcaatcagcacattgcgcgtttccgtcatcgcttcgccagttaaatggttgataacatcaacctgctgcttatccggtgcaaagcagaccgcctgcgcaccgctgcgactaatagctaacaacgtcaacaccgcttcatgaatttcagaaccgtcatagacgccgcatccgctcagaattacgccaattttcttcattgtgatcatcctttcgcaattgactgaaacacattaatttttttaataaaaatggtacgcatcacacatttaactgattcatgtaacaaatcatttaagttttgctatcttaactgcgtgcggcctgaaaaacagtgctgtgcccttgtaactcatcataataatttacggcgcagccaagatttccctggtgttggcgcagtattcgcgcaccccggtctagccggggtcattttttagtggcttttgccacccacgctttcagcacttctacgtcgtgacgccactcttctttcatctcttcaatccattcaccgacgttatcttcccaggccggaaggtcaggagactgaatttgctgacccagctgttgcagatggcgtaaccccacactccccgccgcacctttaattttatgtccttcctcaacaatgccttttttatcctgcgccgtcagattgctctccagcacgctgacatagcccggcatcatcttctcaaacaccgctaacccgtcggtgatcagcttcggtcctacaagttcgagatactgttccagcatgggaatatcgagcaatgcttcacttttactgttctcttctgtcgtcaccgtactctcctcatcatcctgggtatcccagaatttcttgatcatcgcggttagcgccggaacagaaagcggcttactcagcacatcatccattccagcattgaggtactcttgtttgtctttcagcacgttagcggttaaggccaccagcggcggtaaatcctcgcgcggataacgtttcgtcagttcacgagagatatccagcccggtcatatctggcaactgaatatccagcaacaccaggtcgtattcgcccggtttaaacatctccagcgccgccttgccggtcatggcgacatcaacgctgttacctaatttttccagcacagaacgcgcaacaatcacgttcagttcaatgtcttccaccagcagcacattcagcgccggtaaaggcatatcgtcttcatcaaacgcatcatcgacctcttctgctacgctcggtgcgtggatcgtcaacgtaaaggtactacctttgccctgttcgctggtaaccgtaatatcgccgcccatatttttcgccagacgacgagaaacggccagaccaataccggtgccggtggcaggtttaccgccatgactgtctttcacctggtaatacatggcgaaaattttatccagctcatcctgcggaatgccgataccagagtcttccacttcaaaatgcagcatatcgccttcatcgtagcgcacgcgcacggtaacctggccttgctgggtgaatttgacggcgttactgatgaggttccacaggatctgccgtaaacgcgtcccgtcggtaatgacctgatgcggtaatggcagcgtcggctccaggttaaagcgcaatcctttttgttgcgcctgcaatgcggagagattttccagatcggcaaggaagctggtgaaatcaaccggttgattatcaagctggaccttgcgccgttccatcttatccatgtcgataatatcgttaaagatattccccagcgtgacggcgctaacatggatggtcttgagatatttttcctgctcggcggtgagttcggtatccagcagaatgcggctcagaccgacgataccgttcagcggtgtacgcaattcgtgactgatggtggagataaacgtcgttttgtcgcggctggcccgttcaagcgcatcctgataccgcttacgctcggtaatgtcgcgaccaaagcccatcaaaccgtgacgtttacccacgcggtcgtagtacggcactttacggatttcaaagcaggctttgcgcccgtccgggtaatccagccactgttcataggtcagactcacattatgacggaacactttttcatcggtttcaatgacttttgcggcggcttccggactgtaaacatcagcaggtttcaggtgaaccagttgtttttcgctttttccggtcagcagctccatcgcgcggttacagccggaaaactctttatcttcgttacgataaaaaaccaggtcgggactagcatcaaggaaggaacgtaagaaactggattgctgctcgagctgaatttgtgtctcttcgcgctctttgatttcaattttcagttggccgaaggtttcctgcagttctgcttccgctttttcacgaacggcaatttcctgatttagctgggcaatattatcttttaactgaacgttgaggctcaaatcgcgctcgcgcatctcctccagtttttgcaccagccgactcagacgttgtcgactctcctccagttgctcgacgaccacgcttagaaagtagaccgcccacggcgtaatcagcaaaccaaagaagatagaacgaataacatcaatgctttcgacctgaccatgcagcaccatggttaccgccatttgtaccacaatggcaagaacgacgagggccagcgccagcaacatactgaagcgcaccagacctaacttcatcatcaggtcaacataatactgcgccagcagacgaatttgcttcattagggaattccttcacgacaacctgccccaataatacccaattctgacagttacgttataaattgtgtgagaaatgcggaattcccctcaacgacttactccgttggaggtagccacggacgtcccagcgcgcttccctgtacgccatgttcattcagatagcgatccagctcgaccattcccgtccatcgattttcgcaccacagcggagcaagcagcgtcgggcgacgggcgctggcggaaatgcggtggtagatcacttccggtggcgtatggcgaatcatttctccggcagtgagcgtgtaatcctccagttcaataccgttcaaacgccccgcttcccaggctttcgccataatgctgcctttcacaatatgcagcggatgcagctttatgccgtccacgccggtttcaaccactcgctccagcgtttgcaaacattcagcctgcccttcgccaggcaggccgacaattaagtgggaacacaccttcagcccgcgctgacgtgccagctgggttgtacgctgataacaggcaaaatcatggccgcggttgatgcgatgcagtgttttgtcgtgggcggtttgtagccccagctccagccacacttcgtaaccctggtccttatattcgcaaagcagatccagcaccgcatccggcacgcagtccgggcgggtacccacacacaaaccgacaatattggcctggctcaccgcctgctgatacatagaacgcagcacctgaacttccgcaaaggtgctggtatacgcctgaaagtaggccagatagcgtttagcgcggttaactaaattcgcctggtgcgccagttgctcggcaatggaacgatgctgctgcgcttcatcggcaaagctggcaacattacagaatgtgcagccaccacgcccgatggtaccgtcacggttagggcagctaaaaccgccgtgcagcgtcagcttatgcaccttttgcccataacgacgggtgagatcaccaccaaacatattgactaatttctgtaactgcataatctgatagaccgcgccttgaaaagaggccaaagcctgccatttttagctcaattcggcgatgacctggatcaatcgtcccggcctgcttttatcaactgcataatcaatcaaaattaccgaaatttcatgcataatcacataaatcacttttgcttatcttgtgtcagatttttttatctcctgatggattttaggcaaaaacagtagcatgaaacgtcattaccaattaaggcagtataaaatgctggttttgtcgtcagttcaaggcaggataagggttaacacacctttatgacagtcaggaattgactgtttctctaacgacttcccttttagccttaaagataaaatccattttaatttcagtcatttaataaagaattttgcgctaaagcacatttctgtaccaataagcttgccatttgacctgtatcagctttcccgataagttggaaatccgctggaagctttctggatgagcagcctgctcatcatatttatgcagtaattgagatcccctcttcaccgtattaaccgatgcgaaaaggacaacaagggggcgaatgcgaggcgcgcgtatgacacgcaaaccccgtcgccacgctctttctgtgcccgtgcgcagcggtagcgaagtggggttcccgcagagcctgggggaggttcacgatatgttgtacgataaatcccttgagagggataactgtggtttcggcctgatcgcccacatagaaggcgaacctagccacaaggtagtgcgtactgcaatacacgcactggcccgcatgcagcaccgtggcgcgattctcgccgatggtaaaaccggcgacggttgcggcttgctgttacaaaaaccggatcgcttttttcgcatcgttgcgcaggagcgcggctggcgtttagcaaaaaactacgctgtcgggatgctcttcctgaataaagatcctgaactcgccgctgccgcacgccgcatcgttgaagaagaactgcaacgcgaaaccttgagcattgtgggctggcgtgatgtccccactaacgaaggcgtgctgggtgaaatcgccctctcctctctgccacgcattgagcaaatttttgtgaacgccccggcaggctggcgtccacgcgatatggagcgccgtctgtttatcgcccgccgccgcattgaaaagcgtctcgaagccgacaaagacttctacgtctgtagcctgagcaatctggtgaacatctataaaggtctgtgtatgccgacggatctgccgcgcttttatctggatcttgcggacctgcgtctggaaagcgccatttgcctgttccaccagcgcttctccactaacaccgtaccgcgctggccgctggcgcaaccgttccgctatctggcgcataacggtgaaatcaacaccatcaccggtaaccgccaatgggcgcgtgcgcgtacttataaattccagacaccgcttatccctgacctgcacgacgccgcaccgttcgtcaacgaaaccggctctgactccagtagcatggataacatgctggaactgctgctggcaggcgggatggatatcatccgcgccatgcgtctattagtaccacccgcctggcagaacaacccggatatggacccggaactgcgtgccttctttgactttaactccatgcatatggagccgtgggatggcccggcgggcatcgtgatgtccgacggtcgttttgccgcctgtaacctcgaccgtaacggtctgcgtccggcgcgctacgtcatcaccaaagataagctcatcacctgcgcctctgaagtcggtatctgggattaccagcctgacgaagtggtcgaaaaaggccgcgtcgggccaggcgaactgatggttatcgacacccgcagtgggcgtattctgcacagcgcagaaaccgatgacgatctgaaaagccgccatccatataaagagtggatggagaaaaacgtccgccgactggtaccgtttgaagatctgcccgatgaagaagtgggtagccgcgaactggacgacgacacgcttgccagctaccagaaacagtttaactacagcgcggaagagctggactccgtaattcgcgtactgggcgaaaacggtcaggaagcggtcggtagcatgggcgatgataccccattcgccgtgctctccagtcagccgcgcattatttacgactacttccgccagcagtttgcccaggtgactaacccgccaatcgacccgctgcgtgaagcgcatgttatgagcctcgccaccagtatcggtcgtgaaatgaacgtcttttgcgaagcagagggccaggcgcaccgtttaagctttaaaagcccgattctgctctactccgatttcaaacagctcacgacgatgaaagaggagcactaccgcgcagatacgctggatatcacctttgacgtcactaaaaccacgctcgaagcgacagtcaaagagctgtgcgacaaagccgaaaaaatggtacgtagcggcaccgtgctgctggtgctctccgaccggaatatcgctaaagatcgcctgccggttccagccccgatggcggttggcgcgatccagacccgtctggtcgatcaaagcctgcgttgcgatgccaacatcatcgtcgaaaccgccagcgcccgcgatccgcaccacttcgccgtgttgctgggcttcggcgcgacggctatttatccataccttgcctatgaaacgctgggccgcctggtagacacccatgcgattgccaaagattatcgtaccgtgatgctcaactaccgtaacggcatcaacaaaggcttgtacaaaatcatgtccaaaatgggcatctccaccatcgcctcttaccgctgcagcaaactgtttgaagcggtcggtctacacgatgatgtagtgggcctgtgcttccagggggcggtcagccgcattggtggagcaagctttgaagacttccagcaggatctgctgaatctgagcaaacgtgcctggctggcgcgtaagcccatcagccagggcggtctgctgaaatacgtccacggcggcgaataccacgcctacaacccggacgtggtgcgcacgctgcaacaagcggtacaaagcggcgagtacagcgactatcaggaatacgcgaagctggttaatgagcgtccggcaaccacgctgcgcgatctgctggcaattacgccgggtgaaaacgcggtcaacattgctgatgttgaaccggcaagcgaactgtttaaacgctttgataccgccgcgatgtctatcggcgcgttaagcccggaagcccacgaggcgctggcggaagcgatgaacagcatcggcggtaatagcaactccggtgaaggcggcgaagacccggcgcgctacggcaccaacaaagtgagccgcatcaagcaggtggcttccggtcgctttggggttactccggcgtatctggtcaatgccgacgtcattcagattaaagtcgcccagggcgcgaagccaggcgaaggcggtcagttgccgggtgataaagtcacgccttacatcgccaaactgcgctatagcgtgcccggagtgacgctgatctccccgccgccgcaccacgatatctactctatcgaggacttagcgcagctcattttcgacctcaagcaggttaacccgaaagcgatgatctccgtgaagctggtttccgaaccgggagtaggcaccatcgcgactggcgtggcaaaagcttatgcggacttgatcaccatcgcaggctatgacggcggcaccggcgcaagtccgcttagtagcgtgaaatacgcaggctgtccgtgggagctggggcttgttgaaacccagcaggcgctggttgctaacggcttgcgtcacaagatccgtttgcaggtcgatggcggcctgaaaacgggtgtcgatatcatcaaggcggcgattctcggcgcagaaagcttcggcttcggcactggcccgatggtggcgctcggctgtaaatatctacgtatttgccatctgaacaactgcgcaacgggtgtagcaactcaggatgacaaactgcgtaagaaccactatcacggcctgccattcaaggtgacgaattactttgagtttatcgcccgtgaaacccgcgagctgatggcacagcttggcgtaacacgtctggtggatctgattggtcgcaccgacctgctgaaagagctggacggtttcaccgccaaacagcagaagctggcgctgagcaagctgctggagactgccgaaccgcatccaggtaaggcactctactgcaccgaaaacaacccgccgtttgataacggcctgctgaacgcgcagttgctgcaacaggcgaaaccgtttgtcgatgagcgccagagcaaaaccttctggttcgatattcgcaacaccgaccgttctgtcggcgcgagccttagtggctatatcgcccagacgcacggcgatcaggggctggcagccgatcctatcaaagcgtacttcaacggcaccgcaggccagagcttcggcgtgtggaacgcgggcggcgtggaactgtacctgaccggtgatgccaacgactatgtcggtaaaggcatggcgggcggcttaatcgccattcgtcctccggttggttccgccttccgcagccatgaagcaagcattatcggcaacacctgcctgtatggcgcgaccggtggtcgtctgtatgccgcaggccgcgcgggtgaacgtttcggcgtgcgtaactccggtgctatcaccgtggtagaaggcattggcgacaacggttgtgaatatatgacgggtggtatcgtctgcattctgggtaaaaccggcgttaacttcggtgcgggcatgaccggcggtttcgcttacgttctcgatgaaagcggcgatttccgcaaacgcgttaacccggaactggtcgaggtcttaagcgttgacgctctggcgatccatgaagagcatctgcgtggtcttatcaccgagcatgtgcagcataccggctctcagcgcggtgaagagattctggcgaactggagtaccttcgccactaaatttgcgctggttaaaccgaagtccagtgatgtaaaagcactgctgggtcaccgtagtcgtagcgcagctgagttgcgcgtgcaggcgcagtaaggggtagcaacaatgagtcagaatgtttatcaatttatcgacctgcagcgcgttgatccgccaaagaaaccgctgaagatccgcaaaattgagtttgttgaaatttacgagccgttttccgaaggccaggccaaagcgcaggctgaccgctgcctgagctgcggcaacccatactgcgagtggaaatgcccggtacacaactacatcccgaactggctgaagctcgccaacgaggggcgtatttttgaagcggcggaactgagccaccagaccaacaccctgccggaagtttgcggacgagtctgcccgcaagaccgtctgtgcgaaggttcctgcactctgaacgatgagtttggcgcggtgaccatcggcaacattgagcgctatatcaacgataaagcgttcgagatgggctggcgtccggatatgtctggtgtgaaacagaccggtaaaaaagtggcgattatcggcgcaggcccggcaggtctggcgtgtgcggatgtcctgacgcgtaacggcgtaaaagccgttgtcttcgaccgtcatccagaaattggcgggctgctgaccttcggtattccggccttcaagctggaaaaagaggtaatgacgcgtcgccgtgaaatcttcaccggcatgggtattgaattcaaactcaataccgaagtgggccgcgacgtacagctggacgatctgctgagtgattacgatgccgtgttccttggcgtcgggacttatcagagtatgcgcggcgggctggaaaacgaagacgccgatggcgtgtacgcagcgctgccgttcctcatcgccaacaccaaacagttaatgggctttggtgaaacccgcgacgaaccgttcgtcagcatggaaggcaaacgcgtggtggtccttggcggtggcgacactgcgatggactgcgtgcgtacgtccgtgcgccagggagcgaagcacgttacctgtgcctatcgtcgtgatgaagagaacatgccgggttcccgccgcgaagtgaaaaacgcgcgggaagaaggcgtagagttcaaattcaacgtccagccgctgggtattgaagtgaacggtaacggcaaagtcagcggcgtaaaaatggtgcgtaccgaaatgggcgaaccggacgccaaaggccgtcgccgcgcggagatcgttgcaggttccgaacatatcgttccggcagatgcggtgatcatggcgtttggtttccgtccacacaacatggaatggctggcaaaacacagcgtcgagctggatagtcaaggccgcatcatcgccccggaaggcagcgacaacgccttccagaccagcaacccgaaaatctttgctggcggcgatatcgtccgtggttccgatctggtggtgaccgctattgccgaaggtcgtaaggcggcagacggtattatgaactggctggaagtttaagcgaggtaacaatgaattcgccagactgtgtctggcgaatcaaattactgacgaagtgcgcgttgttttctggcaaatgcggcatgagcgtttgacctttcctataatagggataattttcaataaattgtgctttgttcaccaagtctgatgagtgaagcacatcaagcaatttctcatttacaatccgtctcaattacttgttaacacctctgacaataccgattctgcaagctattcagtcttttcattccatgtaaattgtctcgatattaatatacaaaatatgaatataaaaaaccaatatattatccttaattatctatatattttcctatttttcagcgcaaacattcatgtaatgaataattatcaccacaaaccacctcaccagcaccttattattcacatgatcgtaactataaaattcattaaataaatacatcccagcaagttggctatttctgaacgagttatttatttacattcacaaacagatatatatactgcttcagctttttattttaaaaaataaatttgttattaaggatatgttcatatgtttttcaaaaagaacctcacaacagctgctatttgtgcagcactttctgttgcagcattcagtgccatggcaacagatagtactgatacagaattaactatcatcggcgagtatacccctggtgcatgtaccccagttgttacgggcggcggcattgttgactatgggaaacatcataacagtgcgctgaatccgaccggtaaaagtaataaactggttcaactgggccgcaaaaacagcacattaaatataacctgcacagcaccaacgctaattgctgtaacctccaaggataaccgtcagagcaccattgtagcgttaaacgacacatcctatattgaaaaagcttatgatactctcgtagatatgaagggaacgaaaaacgcctttggtttaggttctgcgcctaatggacaaaaaattggcgctgcatccattggtattgacaggtctaatggtgggattcacgcggcggacgatacaggtgaaattcctgtcgacctgattcaaactgaccactggagtgcagcgacccccacatggaaagccagttctaatggcgcattctgcagcctgacaagttgcagtgcaatcgagcgcggttattctgttgcaaaaacaggggaactgacacctgttgctattacagcggtcaccttcccgttactgattgatgctgcggtaaatgacaatactattcttggttctgatgaaacgatcaaactggatggtaacgtcactatcagcgttcagtatttataagaacttgtaatacagtttttatttttacgcattaaccagttagctataactcggacagattatgccctatgacatggtctgtcttaatcaatctcatcgcaaacagtgcataacatatattaacaatatgtttctgcgttatttatcattattacaggagttttaatttaaatgctcagacacattacattcactgtatttataacaacatcaatgaatactaacaatgccggacaggagtactatcaggcattcgttttatacgatcggttaatgtttcaggaaagctcttcgcatatcttggggaaagtaaatgtaatacgctgttcttaattgttcagtgctcaccccccagagtatagctcattccattattcaacttagctccatataaagggacagataatggaaagcctcagtgaaggaaccacagcaggctaccagcaaatccacgacggtattattcatctggtcgatagcgcccggacggaaacggtacgtagcgttaacgcgttaatgaccgcgacgtaccaggaaattggccgacgaattgtcgaatttgaacaaggtggcgaggccagggctgcgtatggtgcgcagctaatcaagcgactaagtaaggatttatgtctaaggtataagcgtgggttctctgcaaaaaacttacgccaaatgaggcttttttacctcttttttcaacatgttgaaattcaccagacaatgtctggcgaattaacaccattgggaattccgcagacaccgtctgcagaattcccaagcgcaaagatttggcagacgctgtctgccaaatctttccccttgcccaggtccacctacgtccgtttactttccgttaaaaacgctgacgcccgcagcttttatgaaaaagagacgctccgctgtggctggtctgttcgccagctagagcggcaaattgcgacccagttttatgagcggacactactgagtcatgacaaaagtgccatgctgcaacaacacgctcctgccgagacgcatattcttccgcaacaggcgatacgcgatccctttgtgctcgaatttctggaattgaaagatgaatatagtgaatccgattttgaggaggcgctgatcaaccacctgatggatttcatgctggaacttggggatgattttgcctttgttggtcggcagcgaaggttacgcattgatgacaactggtttcgtgtcgatctgctgtttttccaccgccgtttacgctgcctgctaatcgtcgatctaaaagtgggcaaattcagctatagcgatgccggacagatgaatatgtatctcaactacgccaaagagcactggacgctaccggatgaaaatccgcccatcggtctggttctctgtgcagagaaaggagccggagaagcgcattatgctctggcaggtttgcctaacaccgttctggcaagcgaatataagatgcaactacctgatgagaaacgactcgcagatgaactcgttcgaacacaggcggtgctagaggaaggctatagacgccgttaatttcagcggtttcgaattctgcagacagtgtctgcagaatctttaaaacgaactaagttttaagccattaaatcagccttaaccttcaccacaacctttttaatctctccaggctcgccgacaacgcatcctggtttatgcggttcacctggcataaacacggcgaacattcccggttttaagatgatggcttgctcgttatcaatggtgctgcaaagctgataatcatcctcatggtggaactcttcacactgacgcgcagtgcctgccatgccaaacagaatccgttcctcaccgtttaataacagctggatatcaatgtattgctcgtgcaattccgcttttttctcgacggggctttgagtgttaaacgtcatgacattcataaagatattgtcgccctgtaattcgtaacgacccggcgctttttcttgcggtctggcagctaatgccagcgttaacgcgtcctgtaacgcaggatgtaacccagcagacggtaaactctgtacttcacccatcatcataatttttctccctgggccaacagcgcagccccaagtaaacctgcatcatggcggtaatgcgccgccagtaaatcaacatgaaatgccgctggctcctgcgccagatacgtttccaccagcgccagatacccttctgccagaccaacgctgccaccgaccaccacgcactggcaatcagttgtggctttaatatcagcgatcagccttgcaagcgtacgtgcggagcggtgaatcagctgctgcgcctgctcgtcaccctgcccggcgcgcgtgaaaatagttttcgcatccgcgccagccaactccccctgcgctgccgctgcaatgccgcgaccagaagcaatcgcttccacgcaacctgtgcgtccacagccgcagactgggccgtgtggatcggcaagcgtatgcccgatatgccccgccagaccgccagggccggtaagcagtttgcagccgctcactacaccgccgccaacgccggtggaaacggtgataaagaccatatcggttatatcgccatccagcgcctgaaactccgcccatgctgcggcctgcgcgtcgttaatggcaatggtcggcaaattggtaagttgttccagcgttttgactaacggaaagtgtagcaatccaccaagattatgcggattaagcgccagcaagctgccgtcacggattatcccggtgctagcgatggcaacccgctgcgcatgagcttgcaacggagagactaatgcggataaggcatcacgcaaggcttctggtgtctggctggctggcgtaggaagttcacgacgatcgcggatctgcccgtcagcgccaatcagcgcggcggcaagtttagtaccgccgatatcaatcgccagtgtggtcatagcaccgcctttttcatcgctgtgttgtaccactgacaaatgtgctcaagacgcgtgattgcagaaccgaccgtcaccgcccacgcgccgtggcgcatcgcatccgccgcctgagcaggcgtgttgtaacgcccttcggcaatcacccgacatccggcgtcgctcaacgttttcaccagcgccagatccggctcttctggcgtttcaggcgtggtatagccagaaagcgtagtgccaataatttcggctcccagcttttggcatgccaggccgtcttccggcgtactgcagtcggtcatcgccagtaaaccgtgatggtgaatacgtgccagcagcgtttcaacaggcaccggacgcgggcggtcggtgccgtcaatggcgataatgtccgcgcccgcctgcgccagcgcatcaacatcttcaatataggccgtgatgcgtaccggagaatcctccagatcgcgtttcacaattccaataatcggcacgctcaccaccgcacgcgtggcttgcagatttgccacaccttcaatgcgaatggcaaccgcgcccgcctgttctgccgctaatgccatggcggcgacgatttcgggtttatcgagcgggctgtccggaaccggctggcaggagacaatcaggccaccgttagcagcgattttttgatccagttgtgcaagtaagctcatacatcttcccttagcgaaaggcccggtacatagaccgggcaacaggattaacttttggttttgactaaatcgtttttggcgctgccaaacggcacggcaccgctgaatggtttaccgtcgatagcgtcatgagtacgcaacgcttccgggcgcaaccaacgctgaacgcgagaaggcatatccagcccaatcagcaggatcaccacgaacgtcagactgaagctgaggcttgccagcgcagtacccagatccagacgttgagcgatcaacgcgccgatgattggggccagtgcaccgcccaatgcgccaacgttgtaggtaaagcccaggcccgctgcacgctggtcggtatcgaaataaccgccaatcagttttggtaagatcccggcgatcccttgtccaagcatttgctggaagaacagtaacagaccgagcacccagacgtttgcgccgccaatcgcaaataccggaataatcagcagctggctggccagcaggctacaaacgtacgctttgcgggttcccagccagtcaccgaggaagccacctacgcagcatcccaccgccgcgccaaagccactaaagaacagcacattggctacagtatgcgggttataagccagatcggttttcagatacgttggcagcagcgcctgaatcggccaactgtagaggaaagcaaacaacacgaccaccatcagcattacgcccgttggccagcgtttgcctgcactctgcaccataaagctgataaagattgcggcgcataacagcccaagaacagcgacgatcgcggcattttgcaggttaccggcgaagcagaaccacagcgcagtagccgccgccagtgtcattacgatattggcaatgcgatgttcaccacggtagagaatatccaccattgtgcgtactggtgctttacctgcgtgtttctctttccagtcttccgcttccgggatgtttttacgcagccagagagcaaagatgattggcaaaatgccgataaagaacagcgcacgccagccccagaccggaaccaccaggctatagacctgagcggcaacgacggcccccacagagaagccactaatcaaaaaaccactggctttgttacgcagatgttttggccagctttcaatgacataggtggcgctggaaccgtattcacccgccatccccatgccgatgaccagacgagcgataaacatggtgatgtagcctggcgcaaagccgcaggccagcgtcccggcgctgaagagaacgatgctggtgaccattgccagacgacgcccgtagcggtcacccatagcgccgagcatcaggccgccgaaccagcgagagataaaggctgcagagatcagacttgccgcctgcaccgtcgtcagcccgaattcaccttgtacttcggtgagtaccagggcgattaaaacgaaatcaaaaccgtcaagcagatatcccaaccaggcagcggaaaatgcgcgccattgtgcacggttgagatggcgataccacgggatattctgggttgtagtactcattgtgagtctcccgcggtgggcgatgcccacacgctttggtatgaaaattgtagggtacagatgcgtttatttcccctcacccggtaggggcgagcgaggggaaacaactcacccgcgctcttgcatcaactgctgggccagcgccttcagttctggcagatatttttcatctaccggtccaaacggtttgcggcacagcggcacagaaacgacatccatataatggaggacagttttcaggccgcggaatacgcccgttttgatcagtaaatcaatgactttattgcattcagtttgcagtttctgcgcggtctggatatcgccttctttcagcgccttaacgatcccctgatagcgccagcccatgatgttgtaggtactgccgataccaccatcagcgcccgccagcagaccagaggcgaagatttcgtcgtaaccgttatagagcacaagatcaggatgttcacgacggatctgctccatctgatagagatcgccagaggtctgtttcagcgcacctacgccaggcaatgtaacaagtgtgttgatctgatccagggtcagttttaccccactcagggctggaatgttgtacaccaccatcggcaaaccatccgcgctatcaataattgcccgatagtgatcgcagtgttcttcaaagctgaaaggatagtagaacggcgtgacggcggagacggcatcgaagccataacgtttagcgcttgccgcaagttgttggctttcggcggtgctgacgcaaccgacgtgggcgatgagtttaatcttacctttcgcctcttcggcgacgatttccagtacctgttcacgctcggaaaggctttgtacaaaggcctcgccggtgctaccacccacgtataaaccgtcgatgccctgctgaatattgaactgaaccaggcgacgcagactcgctttatccagtgcttgttgttggtcaaaaggagtcaggagtgcagccattacgccacgtaaattcgttgccataaatacctctgaagtgatgcttgtctgataaacgatatacctttatacctgttataccagatcaattaagcaacaccccatacagaaagcttataatgcgatctgcttcactaaagtggcattatttctttttgttggtggtctgaccgaaagcgtgccaggtagcagagacgctgttgagatggctttgcaacgcacgatcggcttcgtcaggatcatgacggcggatcgcatcaacgatcgcaatatgctgttgataactaacgttgttatgttcgtgcagtgcctgatcggtaaccgttgggcgtgcggcaataagccagtcgagcagggcaacgtggatcgccatgaagattgggttaccggggatctccgccagcacgcggtggaaatcaacgtcactacgaatgaatgccgcgttgttatccaggctctgactgttgatttccagtgcttttgccagcaaatcgatttgctcatcggtggcatgttcagccgcatagcgcaccagactggattcaaagaacagacgtaattgttcgaaatgggcaatcccaccgggatgagaaaggaaatctttcgccatgccggaaagctcaccgatgatagtgtccgcagaaggacggctgacgcgagcgcgttcgccgttgtttatttgcaccagacctttgcgttttaacgctgccagcgcttcacgcacgctaggacgcccgacgttaaagaacgccatcagttcgcgttcagacggtaattgttcaccttcgccaaattcacgacggcggatcatctgttccagctcttcttccaccatttcggagagttttttacgcgccagcgggcggctacgcaagttgcgaccaattgcaggactagaatcttcggtttggctatcaaatgcgttcataaggcccattctgtaaggtcagtgtgattaacatcatcagtgacatcctatcacaggattgaaagtaggggaaaatggcagggttttctctttgtgcctcatcattaccataattaacggaataattaactattgcgaaaaattaatgtaacgcagataaaaacatcccgtttgaattatttataagactattcacgagcattatgaatattatgaatgtgttcttacaaaataatcataagcgcatattttttaatgaaaaatcacctcacctacaattaaaaacacgacatccgcaccataaatagccttgcaaaaaatataacatcgttgttttcaatctgccgtttatgggattgaccgttttcttttgacacggagttcaacaatgttcggcataattatatctgtcatcgtattaattacgatgggctatttgatcctgaaaaactacaaacctcaggtggtgctggctgccgcaggtatcttcctgatgatgtgcggtgtctggttagggttcggtggtgtactcgatcccaccaaaagcagcggctacttgatcgtcgatatttataatgaaatcctgcgcatgctgtccaaccgcattgccggattggggctgagcattatggcggtgggcggttatgcccgctacatggagcgcataggggccagtcgcgcgatggtgagcttgttaagccgcccgttaaaactcattcgcagcccgtatattattctgagcgcaacttacgtcatcggccaaatcatggcgcagtttattaccagcgcctccggtctgggtatgttgctgatggtcaccttatttccgacgctggtgagtctgggagtaagtcgtctctctgcggtggcagttatcgcaaccacgatgtccattgagtgggggattctggaaacgaactccatttttgctgcccaggtagcgggaatgaaaattgccacatacttcttccactaccagcttccggtcgcctcttgcgtcattatcagcgtggcgatctcccactttttcgtgcaacgcgcttttgacaaaaaagataaaaatatcaatcacgaacaggcagagcaaaaagctctcgataatgtcccgccgctctattacgccattttacctgtgatgccgttaatcctgatgctcggcagcctgttcctcgcccacgtcgggctgatgcagagtgaactgcatctggtggtggtgatgttactgagtttgactgtgacgatgtttgttgagttcttccgcaagcataacttgcgcgaaacaatggacgatgtgcaggcgttttttgacggcatgggtacgcagtttgccaacgtggtaacgctggtggtcgcgggtgaaatatttgcgaaaggcttaacgacgattggcactgtcgatgcggttatcaggggggcggagcattctggtctgggcggtattggcgtgatgattattatggcgctggtcattgccatttgtgccattgtgatgggctctggcaatgcgccgtttatgagttttgccagtcttattccgaatatcgcagccggactacatgtaccagcggttgtaatgattatgccgatgcattttgccacgacgctagcgcgcgcggttagcccgattactgcggtggtggtcgttacgagtggaattgcaggcgttagcccttttgcggtggtgaagcggacagcgatccccatggcagtcggtttcgtggtgaatatgattgccacaatcacgctattttattaagtcattaaaaagacaaaacaggccgcctgggcctgttttgtattacttcacaacgcgtaatgccggtcgaccaccgcgtggtggctgcggaggttcatcgtcaggatgagtgtcatcatcgtgatctggcttgtcgccatcaataacgctcataacggtttcgttgtctgcgcttgcctcttcatcattcatgatgctggtatcttcatcgtaggcagcttcaggctcaaacatcgtgcctgcgccattttcacgggcgtagatagccagcacggcagccagcggcacagaaacctgacgcggaatgccaccaaagcgcgcgttaaagcgcacctcatcattcgccagttccagattgccgacagcacgcggcgcaatgttgagtacgatttgcccgtcacgcgcatattccataggaacctgcacgccagggagcgtcacatccaccaccaggtgcggcgtgagctggttatccagcaaccactcatagaatgcacgcagcagatagggacgacgtggtgttagctgactcaaatccatacagattaactccggcccagacgcatttcacgttctgcttcagttaaagaagcaaggaaagagtcacgctcaaagacgcgggtcatatagcctttcagctctttcgcacccgggccgctgaactcgatgcccagttgcggcagacgccacagcagcggagcaagatagcaatcgaccaggctgaactcatcgctcaggaagtacggcttctgaccgaagaccggcgcaatcgccagcagttcttcgcgcagttgcttacgtgcggcatctgcttcagaagcactaccgttgatgatggtgttcatcagcgtgtaccagtctttttcgatgcgatgcatgtacagacggctttcaccgcgagctaccgggtaaacaggcatcagtggcggatgcgggaaacgctcatccagatattccataatgatgcgagattcccacagggtcagctcacgatccaccagggtcggaacgctctgattcgggttgaggtcaatcagatcctgaggcggattgtccttttccacgtgttcgatctcgaaacttacacctttctcagccagcacaatgcggacctgatggctatagatgtcagtaggaccggaaaacagcgtcattacgctacgtttgttggcagcgacagccatgaaaacctccaggtatagtcagaatttttactgctaccagccaccaggtggccagtcagaagttgtgttacccaataaggaacgactctctttgttcgaaaatcaaacaaaaaatgagcaatacccgacatttgggcagaaaattggatgatagtttaccagattttgcgaccattgtggtgagtcgatgccggaaatggggaaaaagagatgcgctttagtctgaaatagttgacttagtcccttattggcgatgtggtttttgttttacctgtctgtcaggtggcagcaaaaagcaactttccagtttttacgctgattcagattttagctataaaaaaacccgccgaagcgggttttttcgaaaattgttttctgccggagcagaagccaattaacgtttggagaactgcggacgacgacgtgctttacgcagaccgactttcttacgttcaacctgacgagcgtcacgagtaacgaagccagctttacgcagttcagaacgcagggactcgtcgtattccatcagagcgcgggtgataccgtgacggatcgcaccagcctgaccagagataccaccacctttaacggtgatgtacaggtccagtttctcaaccatgtcgaccagttccagcggctgacgaactaccatgcgggcagtttcacgaccgaagtactgttccagagaacgttggttgattacgattttaccgttgcccggtttgatgaaaacgcgagctgcggaacttttgcggcgaccagtgccgtagtattgattttcagccattgcctataatcccgattagatgtcaagaacttgcggttgctgtgccgcgtggttgtgctcgttacccgcgtaaactttcagtttacggaacatagcacgacccagcgggccttttggcaacatgcctttaaccgcgatttcaatcacacgctcaggacggcgagcaatcatctcttcaaaggtcgcttgtttgataccaccgatgtggccggtgtggtgatagtacactttgtcagtacgcttgttgccggttacagcaactttgtcagcgttcagaacgatgatgtaatcaccggtatctacgtgcggagtgtattccgctttgtgcttaccgcgcaggcgacgagccagttcagtagccagacggcccagagttttaccggtcgcgtcaacaacataccagtcgcgttttacggtttctggtttagctgtaaaagttttcattaaaagcttacccaataaatagttacacgttggtgaacacccaaacgtcttcaattgttgaggttcacacgacaaagtccggcaaacctaccccttcgaatagcctatgccagcacacaaaaagttttgggaaaaaaactttcttgtaacgtggggtcgcaggattatagagaagtcggggtcaaagatcgacccctttttgtgatttgtgacaggttttaacccgccaaatgctcgcgcttcagatactcttcgctttgcatctcttgcagacgactcaggcaacgctggaactcaaacttcagccgatcgccctgataaatttcatacagcggcacttctgcactcaccactaatttgacatggcgctcgtaaaactcatccaccagcgcaataaagcgccgcgcttcgctctccatcaaccgcgtcataactggtacatcaaacaacatgaccgtatgaaagagacgactgagcgcaatatagtcatgctgactgcgggcgtcgacgcacagcgtagtaaaagagaccgccagcgtctggttctcgacgcccattgttgctaatggccgatggttgatttctaacgtcggactattttctcgtttcccccccgccagcgccaaccatagtttatccatttgcgcccgggtttcatcgtgaagtgggctaagccacagatgcgcctgagtgagtgtacgcagacgataatcaacaccagcgtccacgttcattacatcacaatgctgtttaatggcatcgattgcaggcagaaaacgcgcacgttgcaggccatttcgataaagttcatccggcggaatattactcgtcgctaccagggtaataccgcgagcgaacagggctttcatcagaccgccaagtagcatggcatcggtaatatcagaaacaaaaaattcgtcaaaacagagcacgtcagtttcggctttaaagcgatcggcaataatttccagcggatcggtctgcccctgtaaggcagttagctcttcatgcacccgcagcataaaacggtgaaagtgcaggcgctgtttccgctctcccggcaggctttgatagaaaaggtccatcagccaggttttcccgcgtcctacaccgccccacatatataagccacgcactggcgtatgctttgtgtcttcgcgtttaccccacagcttaccgacccgcgccattagcccactcgtcctgggggctggtggcgtgctattgatgagttcctgataaataatttccaggcggctgacggcctctttttgaacgtcgtcgggttgatggctgccttcattaagcgccttcaggtattggcttgttggggtaacgctttgcatgatcttattgttattccttgaataatcggtgcgccgttgttcacggttgacgaaaaaaaggccgttctacactacgcgatatgcagtcgggattccacttctgtggaattaacggttatagtggcataatcagccgcaggcatggagcctgaagccaacaccctacggaaacaaaagacaacgggagatgttcatgacctgggaatatgcgctaattgggttagtcgtcggcatcattattggtgctgtggccatgcgttttggtaatcgtaaactacgccagcaacaggcgttgcagtacgaactggaaaagaataaagctgaactggacgagtatcgcgaagagctggttagccactttgcccgcagcgcggaattactggataccatggcgcacgactatcgccagctgtatcagcacatggcaaaaagctccagcagcctgctgccggaactgtctgctgaagcaaacccgttccgtaatcgtctggcagagtctgaagccagcaacgatcaggcaccggtgcagatgcctcgcgactattctgaaggcgcatccggcctgctgcgtactggcgcgaagcgcgactaatttatttttcgggcgcagccattgcgccctcctcttctctccctccccgactatcatttaatctggtgtctcattgttagccgtctgaaaattcaataacatcaaactgttttgaatctcttttcttatcattcaggtacgagagcaggaataatgaaaaaacaaacccagctgttgagtgcattagcgttaagtgtcgggttaactctcagcgcgagttttcaggccgtcgcgagcattccaggccaggttgccgatcaggcccctctccccagtctggctccaatgctggaaaaagtgcttccggcagtggtgagcgtacgggtggaaggaacggccagtcagggacagaaaatcccggaagaattcaaaaagttttttggtgatgatttaccggatcaacctgcacaacccttcgaaggtttaggctccggtgtcatcatcaacgccagtaaaggctatgtgctgaccaacaaccatgtgattaatcaggcacagaaaatcagtattcagctcaatgatgggcgcgagtttgatgcaaaactgattggtagcgatgaccagagcgatatcgccctgttacaaattcaaaacccgagcaaattaacgcaaatcgctattgccgactccgataaattgcgcgtcggtgattttgccgtagcggtcggtaacccatttggccttgggcaaaccgccacctctggcattgtttccgcattaggccgcagcgggttgaatcttgaaggtctggaaaactttatccagacagatgcttccattaaccgcggtaactccggcggtgcactattaaaccttaacggtgagttaattggcatcaacactgcaatccttgcgcctggcggcgggagcgtcgggattggatttgccatccccagtaatatggcgcgaacactggcgcagcagcttatcgactttggtgaaatcaaacgcggtttgttaggcatcaaaggcaccgagatgagtgccgatatcgccaaagccttcaaccttgacgtgcagcgtggcgcgtttgtcagcgaagtgttgccaggttctggcagcgcaaaagcgggcgtcaaagcgggcgatattattaccagcctcaacggcaaaccgctgaatagctttgctgagttgcgctctcgtatcgcgaccaccgagccgggcacgaaagtgaagcttggcctgctgcgtaacggcaaaccactggaagtagaagtgacgctcgataccagcacctctagcagcgccagcgctgaaatgatcacgccagcgctggaaggtgcaacgttgagcgatggtcagctaaaagatggcggcaaaggtattaaaatcgatgaagttgtcaaaggaagcccagctgctcaggctggcttgcaaaaagacgatgtgatcattggcgtcaaccgcgatcgggtgaacagcattgctgaaatgcgtaaagtgctggcggcaaaaccggccatcatcgccctgcaaattgtacgcggcaatgaaagcatctatctgctgatgcgttaatgtcgtaaaccgggcatcaggcttacgtgtgatgtccggttaactcgtggtatgctgctgccgttcccttttttaatgacgcctccatcatgtttgtgaagctcttacgttccgttgcgattggattaattgtcggcgctattctgctggttgccatgcctagcctgcgcagccttaacccgctttccactccgcaatttgacagtaccgatgagacgcctgccagctataatctggcggttcgccgcgccgcgccagcggtggttaacgtttacaaccgtggtttgaacaccaactctcacaaccagcttgagatccgcaccctgggatccggtgtaatcatggatcaacgcggttatatcatcaccaataaacacgtcatcaacgacgccgatcagatcatcgtcgccttacaggatggacgtgtatttgaagcattgctggtgggatctgactctctaaccgatctggcggtacttaaaattaatgccactggcggtttacctaccattccaattaatgcacgtcgcgtaccgcacattggcgacgtagtactggcgatcggtaacccgtacaacctcgggcagaccattacccaggggattattagtgccacgggtcgaatcggtctgaacccgaccgggcggcaaaacttcctccaaaccgatgcttccattaaccacggtaactctggcggcgcgctggtgaacagcctgggcgaactgatgggcattaatacgctgagctttgataagagtaacgatggcgaaacgccggaaggtatcggctttgcgattcctttccagttagcaaccaaaattatggataagctgatccgcgatggtcgcgtgatccgcggctacattggtatcggcggacgtgagatcgcaccactgcacgcgcagggcggtggtatagatcaactgcaagggatcgtggttaatgaagtgagtcctgacggcccggcggcgaatgcgggtattcaggtcaacgatctgattattagcgtggataacaaaccggccatctctgctctggagacgatggatcaggtggcggaaattcgccctggtagcgtgatccctgtagtagtgatgcgtgatgataagcagttaacgctgcaggtcaccattcaggaatatccggcaaccaattaagtcgtgcgctcaaaacaaaaaaccggagtctgtgctccggttttttattatccgctaatcaattacttattaacgaactcttcgcccagggcgatatctttcttcagcgtatccagcataccttccagcgcgttctgttcaaatgcgctcagggtaccgatagatttacgctcttccacgccgtttttacccagcagcagcggttgagagaagaaacgggcgtactgaccgtcgccttcaacgtaggcacattcgacaacgccttgttcgccctgcagtgcacgaaccagagacagaccaaaacgtgcagctgcctggcccatagacagggttgcagacccgccaccggccttcgcttcaaccacttcagtacccgcgttctggatgcgtttggtcagatcagccacttcctgctcggtaaaactaacgccaggaacctgactcagcagcggcagaatggtaacaccagagtgaccgccaataaccggcacttcaacttcgcctggctgtttgcctttcagttccgcaacaaaggtgttggaacgaatgatatccagcgtggtaacgccgaacagtttgtttttgtcataaacaccggcttttttcagcacttcagcagcaattgcaactgtggtgttaaccgggttagtgataataccaatgcacgctttcgggcaggttttcgcaacttgctgtaccaggtttttcacgatgccggcgttaacgttaaacaggtcggaacgatccatacccggtttacgcgctacgcctgcagagataagaacgacatctgcgccttccagcgccggagtcgcatcttcaccagaaaaacctttgattttcacagcagtagggatatggctcagatcgacagccacaccgggagtcactggagcgatatcatacagagagagttcactaccactaggcagttgggtttttaacagtagtgcaagcgcctggccaataccgccagcagcgccgaggactgcgactttcatcctaaactccttattatattgataaactaagatatgttgctccgctgccgcgaccttaatccacaaaattgccgtttacaatgaccacatctcaagaatgtgtagtcacgcaagtttagcgtttatgcatttaattgccgtaatcaggaacctaacttacgtaattaacagtcgcttatgcattagcgcaacattccaacaggtggtgacaatataccctaccgttcagccaaaacaacatcaatttgataacaattaatttacttttaagcagaatttgcatgccgtgacgcaggcatgtttctcaataacgaaatttgataaaatcccgctctttcataacattatttcagccttcttcagggctgactgtttgcataaaaattcatctgtatgcacaataatgttgtatcaaccaccatatcgggtgacttatgcgaagcagcgctaagcaagaagaactagttaaagcatttaaagcattacttaaagaagagaaatttagctcccagggcgaaatcgtcgccgcgttgcaggagcaaggctttgacaatattaatcagtctaaagtcagccggatgttgaccaagtttggtgctgtacgtacacgcaatgccaaaatggaaatggtttactgcctgccagctgaactgggtgtaccaaccacctccagtccattgaagaatctggtgctggatatcgactacaacgatgcagttgtcgtgattcataccagccctggcgcggcgcagttaattgctcgcctgctggacagtctgggcaaagcagaaggtattctgggcaccatcgctggcgatgacaccatctttaccacccctgctaacggtttcacagtcaaagacctgtacgaagcgattttagagctgttcgaccaggagctttaatctctgccccgtcgtttctgacggcggggaaaatgttgcttatccctctcaaccccctgctttcccctgcgattaatttaacgaatagtgcgttttactgcgacatgtcattcacacaatgaatacataaggtaaaaaaagcacattatgcaaaattcattatctaattgaaaaaactagaattaacgataaataaccgtatttttaattcttttttgttattaaaattcacatttttaacacttagtatcaactgaaacagttagcgcggtattaattagctcaataattagtgtatacttgattttgtgatatgggtcacgaaacaaaggcccagctaaaagattatgtcgaggtaaaaatcatgaaaatcaaaaccactgttgctgcattaagcgtactttctgttctctctttcggtgcattcgctgccgactccattgatgctgcacaagcacaaaatcgtgaagcaatcgggaccgtatccgtaagtggtgtggcgtctagcccaatggatatgcgtgaaatgctgaacaaaaaagcggaagagaaaggcgcaacggcctaccagattactgaagctcgtagcggtgacacctggcacgctacggctgaactgtacaaataaaccctcatcgtcttgtccgacgatattgcccccggttcgggggcttttttttgcgttaatgacgaacattaaaacgcaaatgcccttccagctcttcctctgcctcatcaaacagcaatattaacgcgccaaaacggcgacgcgttttctctcccagatgaacaaattcaatctcaagtggtagcggcaggacatcgttcattaacacatcccatagactgtcgagatcgcgtaccttatctttcgccagaccaaaggtttggctaaagtcacgataaaaatcctcctgactctcaatctcatcaaaatcaaaggtataaatattcatctgttgccaccgtcacgtttcgcggcgagttctgccgtgcatcgctaagtatagccatgaaaaaaccgacgcttttggcgtcggttttgacttaactatcggtcaacgcatgttgatacttatggagcatccccgccagccgatttaccggttccgtcacctgcggtggcgcttgccagatgcgtagcttttcctggtagatttccagttcttccagcaactggccaaagtaccgacgacgtttatcatcgctacgggcagatatcacatggtctgctgtgcggcgcatttgtcggtgaaacgcgcttaaatcctcgttaaccgggatcggtgcatcacgcaggcgctggtgcgcgataatcatcgtcagcgccaggcgaaatttcggcaaatcccctgggaacttattcatcagcaaaaacagctgctgataaagtgccgggaggtggttctctttacgacgtgccacattggtagtcatcgcggaaacagcggcagaaacaaactgattaagcagtacacgtccggtcctgtcgcggcttttatcccgcaccagcaaaataacggtgaacgcgagcacacagccgacgatttgccctaatgcgctgtcgagaaactgactgaaatggaaagtcatcgggttatccagcacgataatatttatggtgctggccagtgcccccatgctgcccagtcgccgtttctgtacttctataccgaggaagaatcccagcactgccaggctaatgcacagcagcaacatgctctgttgggtattagggataatcaccaaaaagtagagcagccctaacggcagcgcggccagcgtcccgtagataaagtcgatcgccaccatgcgtggattcggcaaacgcattgccagactcgtcactaccgcaatcatcaccattgcaccactgccggaagtccagcccgtccacagccagaaaagcgtgcccagaatgcaggaaagtgtggttcgccagaagttacccattgcatgatgacgttcggcactctctacttttacttccggttcgccttgcaggatctcttcttcggtggcgttgatttttgtgttactgataacgccgcgcttgagaagctgataacgcgttgccgccgcgacccagctataaatggtgacaggcgtttcccgttccccggtccaggcgataactctccgcaggcgtttgagctgcttgtggacgtcctgcgcggtttctaccggcgtgtcaaaaaattcgcggaaagtatcagtgatcaattccgggcgcgtattctgaataagataagtttcgcaggattgggtaatcagcgtcaggcttagcgtattgatcgcttttaaacgtcgattggcccgcgcccagcgggaagattccatattcaggttgctgcgcatgccttgtagcgccgtggtgcgtcgcaccaggtcgccccaggctttatcgacaacttcaccatcgccatgcttgatacagagttgcattaattgatattgcgcgaccagcaaactttccagctctcgatccacttcttgtttgatgcttcgcggagaaaagagcaaatccgccataatcgcacacacaataccgataacgatctcgctacaacgttcgacggcaaactgcggcgtaagcaatggttccggctgaatggtgatcacaatgatcagcgcggtataaccggccagcccccacgcatagctgttttctattcgtaccaggctggatatccaggtacaaaaaccggcccagatacagcacaccagaatcatcaataatggtgcgcggatcatcgcaatgatgatcaccagtccggcaatacagccaataaatgtgccgatgatgcgcaaaaagccacgatagcgaatagcgccagaatacggttcacctcccgcagcaaaggccgtaccggcggcaacaatcgccgctgtcagtaccgcccagcgtggcgtttccagctggaagtgaaagccaacaaacagcgccagtacaatggcggtcgccagttttaccgcaaagcgaatatgttggttagcaatggagaaaatacccatcgtgattaaccaaactcacgcaggcgatgggccattttacggaagaagctatcctggctttcgtcgcgatcttgtttgccagtgaccaccactgtagcagtggtgcccgcaggccagatgttctcttgctggttgtcgagacgaatacgaaccggaacacgttgcgcaagacgcacccattcaaggttagagtctatagtcgccatccctttgtcgtcacgcgtgctgctggcgttggtgacccctgcggcaacactatcaacagtccctttcagcactttgttactgccaagcggcgtgatctctgcacgataccccggacgcaccccttccagcttagtttcttccatataggccagtacatagaaggagttctgtttcaccagcgcaaccgccgtacttcctcgagtaataaactcaccggtatagacgttgaggttggtcacccagccatctgctggcgcgcggatcaccgtgcgttcaagatccagttttgccagatcgcgggtcgcctgcgctttcgctaactgatgcagaaccgtttgtagtacgttgttggcctggtcgatctcttcgcgagacatcgcctgcacaccgagacggttacgacgtccggcctcctggcgtttctcctgtgccagtacctgataataagcaacatcggcttgcgcttcctcaagcgccttttgatagcgcggctggtcgatggtgaacagtatctgtccttttttcaccagctggttatcatgaacattcacctgggtaatgagtccagaaacgtccggcgcgatcgcaacgacgtcagcgctaaagcgcgcgtcacgcgtccagggggattcggtgtaatagacccaggcattaaaaattgcgatgaaggccagaatgactaatacgaccgtgatggccgtacgggagaattttcttattagtgttttcacttcaacctcaaacgaacagtcggcttatcaaataaaacaagcagcaatagagcgcggtgttgaacaacgccggatgccagacaaagtcgtagatacctgttggcacaagtacccggcgcaccagccagaaaatcgccagacttaaaagcaattcaaaaaatatcggtgggaaggacagcccaaacaccacgataacgggaaacagactcatgttgaccttggttgtaaagagagagcaggcgttattattttcagcatctgtcgccgcagagaagggcatggaaagccgggcgagagcaacattgctgtagattgatatttaatatattagcgtaactgttatgctgttatctatattatgtgatctaaatcacttttaagtcagagtgaataatggaacgactaaaacgcatgagcgtgtttgccaaagtagttgaatttggctcttttaccgccgccgccagacagctacagatgagcgttagctccatcagtcagacggtaagtaaactggaagatgagttgcaggtaaagctgttaaaccgtagcacacgcagcattggcctgaccgaagccggtagaatttactaccagggctgccgtcgtatgcttcatgaagtgcaggatgttcatgagcaactgtatgccttcaataacacccccatcgggacgctacgcattggctgttctagtactatggcacaaaatgttctcgccgggctgacagccaaaatgctgaaagaatacccaggtttgagcgtcaatctggttaccggaattccagcccccgacctgattgccgacggtctggatgtggtgatccgcgtcggcgcgttgcaggattccagcctgttttcccgccgtctgggcgcgatgccaatggtggtgtgcgccgcgaaaagctatctcacacaatacggcataccggaaaaacccgccgatttgagtagtcatagttggcttgaatacagcgtgcggcccgacaatgaatttgaactgatcgcaccggaagggatcagcactcgcctgatcccacaaggaagatttgtgactaatgatccgatgacgctggtgcgctggctgacggcgggtgccgggatcgcctacgtgccgctgatgtgggtgatcaacgagatcaatcgtggggagctggagatcctgctgccgcgttaccagagtgatccacgcccggtttatgcgttatataccgaaaaagataagctgccgctgaaggtacaggtcgtgatcaacagcctgacggattattttgttgaggtcggtaaattgtttcaggagatgcacgggcgcgggaaagagaagtaattcatattgtactgttacgttgtacaaacctgtgccaacgggttcccctcaccctaaccctcaccccaaaggggcgaggggaccgttcgtgcacgtagaaagattaattatccttctgaaaatagtgaaattattacgcagtaccgccaacagtcaggttatcgactttcaacgttggctggcccacgccaaccggcaaactttgcccttctttaccgcagacacccacgccgttatccagtttcaggtcgttgccaaccatgctaatctgctgcatggtttcgataccggaaccaatcaacgttgcgcctttcaccggcttcgttactttaccgttttcaatcagatatgcttcactagtggagaaaacgaatttgccggaggtgatatccacctgaccgccaccaaagttcggtgcatagataccgtactcaacggattcaataatttcctgcggggtgcttttacccggcagcatataggtgttggtcatacgcggcatgggcagatgggcgtaggattcacggcgaccgttgccagtcggcgtcatccccatcaaacgcgcgttgagtttatcctgcatgtagcctttcagaatgccgttctcaatcagcacgttgtactggcctggcgtaccttcgtcatcaatcgccacgctacctcggcgatcgaccatcgtgccatcatcaaccacggtacacagttcactagccaccagctccccgacctgtccactaaatacactagtgccacggcggttgaagtcgccttccagaccgtgaccaaccgcttcatgcaacagcacgcccggccaacctgcgccaagtactaccggcatggtgcccgctggtgcagcaacggcagaaagattgaccagcgccatacgcactgcttcttttgcccatgcatccgcacggacttcgccgtcgagatcggcaaggaagaattcataaccaaaacgaccgccgccgccactggcaccgcgttcgcgtttgccatcttcttcgacgagaacgctcacggaaagacgcaccagcggacggacatccgccgctagcgtgccgtcggtggccgcaaccaaaattaattcatagacaccactgaggctggcagtcacttcctgtacgcgcttgtccgcttcgcgggcaaccttatcgacgcgacgcaggatatccagcttctcttcacggctcatgctttgcagcggatctacgctggtatacaacgggctatgctctaccgcgcccagcgtctgtactttaccatcaccactatcacggacgatggtgcgcgccgcttgcgcactctgttccagcgccagcaggctgatttggtcagcgtaagcaaatccggttttttcaccgctgattgcacgcacaccaacgccctgatcgatgttgtaagaaccatctttaataatgcggtcttctaaaacccaggattcgtgatagctgctctgaaaatagagatcgccataatcaaggcgacgttcggccagttgaccgaggatcgcgaacaagtcctgatgtttcaggccgttcgccgctagcaattgttcacttaccaggttaagactcatcgtttttgctactcgttagttactgcagtagaggattttttacggctgccggatgcggcgtgaacgccctatccagcctacggttatgttccggtttgtaggcctgataagacgcacagcgtcgcatcaggcaacggctgtcggatgcggcgtaaacgccttatccgacctacggttatgttccgtttgtaggcctgataagacgcacagcgtcgcatcaggcaacggctgccggatgcggcgtaaacgccttatccgacctacggttatgttccgtttgtaggcctgataagacgcacagcgtcgcatcaggcaacggctgccggatgcggcgtgaacgccctatccgacctacggttatgttctggctcgttggcctttggcaacgattatcctatgagattggggcaattacgcgccctcgtcaaatcattgcgctttttctttacgcggttggcgcaacacttcgttgatttgcggatcgtccagcggaccgctaatgtgatagcgcaaaatggagactttgctccacagcggccccagcactttactggcggcaaacactgccgcgccaacaatggggttaaccgcaaaagccgcagccacgcccaccgtcgcagaaatctctggtgcgacaaccgcttccatattcaggtcgcgacgtaccagatttacgctccctttcatggcgatatccgcctccaggccatccaccagcgtgtcgtcggtgtgcataacgccgtctttaatccacgcggtgctgcgaatggagtcaaaatagaacccttcgccaaaagtgtctctgaaatcaaaacgcagcttacgcatcagggcatctacgctcaataagcgcagcaattgcccggcatgtccggtattgatttcggtaatttcgcctttacccagttgagtatgaatgatgccattcaacgtcgcttcatctggctgccagggtgctttgcgccagtgtaaatcgtaatccacattaaaactgctctggcgtatgggcgtcgtgacaccaaaaaattctgcggcggcatcaattttctgcccgcgcagttttcctttcaggctggtacgttcattccccggattattaacccattcaccatcggcagtaagccggctgaaaccagtatcaatcagtccattggtcagcgttaacgtatcgccagaaatggtgatatcactgtcaatgcgaccgaatttttgcccccagaaccagcactctgtgcatcgtatttgggcgtccggccagccacggaagttaatgcgctccgttgtcgggaaaggactactcggcgtactatcaccacgagttttcgccacgctcgggttgtaataaagatatttgatattcgccagccacggcgcgttattacgcatcgctagcgtggcgttgatttcacgcccttgcgcttcaaccagggtgccatttgccgtcggttggctaacaatactcaggttattccattgctgatttcccagactcaacataggcgtacgtaacgttatgtgttgtgggaaactcgctgcaccaccgacactctccgcagcgcctttctggaacagggccagccactcggcaccattcatcggcggcatattgagttcaacgccactttgttccggcaacggcgggagcgttttactgtctgccgcccaaatagcacgatcgagcgtcagcttttgaccgagcaaccagcggctattgaaatgattatccgcaccagcctgtccggttaattcaaagctgttgagattgccatcaaccttaacgtttaccgctagtggttcacccgcaggtttggctaacggactaggtaagtgactgctcacattctttagatcgccgttcagctctatgttataggtcgcaccagcatgataaggcagatcaatgcccactttaccatcccacgccacgctgccactcaatgcttcgttcaccgcttcaggcagaacgccggttttcgccggttgccagttaccgttgaggtttaccgctacctggtaggcttttgccccttctttggtggaaaaatccacgttcaacggctgattaaaccagcttgctgtcagtggttcactttgcagatcgctattgataaagctgaatttaccgctcaaatttttcagggtgctgtcgagtggtttgataaacagactgttattacgcagcgtcacttcacctttcgcggttaccagttcgccgttcagcgggatatcaagatgtaagcgagcattcacatcgccgtcgagctggagttcttgcagggtcgcacccagagaatctttcagcggtgtctcatcaaagtaagggccaacggctttacccggacctttaatgtcagcgtcaatcagcagtttttctttactgtagtcagggatcactgcggtaagattactcgcgcgcacgccgcccagattaacgccatcggttttcatccataaaccgtcgttaataaagtccagttcaatatcaaggttagttaatgcaggccagtccggctggaaggcaaacttcgcgttgcgcagcggcaccagcacttcaaactgaccttcgttgtgtttataggggaagagttgcggattgccaccataaaccagcgtcgcgttatccgcttcaccgccctgaatcgcgccacttaagtaatcaaccaggtctttacccatcaagttttccgggaaatagcgccaggcttgactaccatcatcggtactgatgccagccagaatacccagccagggttcatcgttagcaggttgcaggtaacgaaaaccgccgcgcgcatggacggctttggctttaacgtcaatattacgcccatccagctggaaacctttgttattgttcagccagcttatagttgcctggccgtcggcgatttctagtggcgcacggaataccgtttcgtaaggcatctttgcctgcttcatgctcgcggtaagcaaaccattttcaacgctgccggaaagcgtcccggagaagtgttccgcacccggtaataatttccattgcttccaggccagatcgctccagcttgcctgaaaacgggtcttgtctgccgcctgaagcgggatatccagcgccagagtgttaatcttgccgctcggttgtgtggagcgccaaacatcacccagtgcaggactaagtttcgcggccagcgggcgtatgccctccaggcctgccagctccagattactggcgcgaatccggagttcgtcactgcgtttattgtctttgccgccaacgtcctgttccggtatccaggccagcgtcaatgctccgctcggccagggtttgccgtccatcgtgatccgtgtatcgggaatagagaactgccagcccggattttcacgcgtaatatgcgcggtcagattatccacgctcagcgtatgcgtttgcttctcgcccaaccagctggcaccgccctgtttcagccagacgtcaccgccggttacatcgcctttgtcgatcgtcatccagccttcaagggagaactgtgccgtttccagcgcaatattgtcctgcatccatttaccgagccacggcttcaggtcgatgtcatccgcctggagccagacgcgaccattgcttaacaacccctcatcatcgcgcaaatccatgcgcacctgcatcacgccgtgctgtccggtaaggctggagaggcttaccaggccttccgcacggtgtcgacgtggatcgttcagccaggtgagttgtgggatcgccagctcggcgcgctgaccggatggcgtcaggaaactgacttcactgtcgcgaagatcgaaatggtcaaattgacgaagaaacagatcgctgatgtgactggcttccagactgtcatcactaccaccgctggtgataggagtgttggtgcgaaagcgcagctgccagaaagtgaggtcgcgaaactgccagcgcatatgtaacaggctctgccagacatccagcgccagagtaacgcgtttaacgctaaattcgccgccatcttttagttctgcacggatgtcgtgtgcttcaagcgtcgggccaaaattctgccagctggcactgagctgactggcttctaccggcatgccagtcgcggattctattttgttgaggatttccggacgccaggcgtcaagatgcggtaaagcaatacgcaggccgctaaccagcagggcagcgatcacaacgagcgcggctccagtaagcagtaaaatccccggcaatcgcctcacccgtcactccttgtctgctaaaaatgtgactcaaaaaccctttgccggatggcggcccagcatctgtttacatcattacgacgtcaaactgctcctggttatagagcggttcaatttgtactttaacctgtttgccaacgaaaatttccacttccgccaggctgtgactctcttcgcctttcaaggcttcagctactgccggagaagcatagaccaggaaacggtcggagtcgtaagcatggtggacacgaacaatctcgcgcatgatttcatagcataccgtttccacggttttcaccgttccgcgaccgtggcaggttgggcattcgttacacagtacgtgctcaatgctttcgcgggtgcgtttacgcgtcatctccaccagccccagcgcgctaaaaccattaacgctggttttcacccggtctttgctcaacgcctgctccaggctgtgcagcactcggcggcggtgatcttcattattcatatcgatgaaatcaataatgataatcccgcccagattacgcaaccgtaactggcgagcgatagcctgcgtcgcttcaatattggtattgaaaatggtgtcgtccagattgcgatgaccgacaaacgctccggtattgatgtccacggtggtcatcgcttcggtctggtcgataatgagataaccaccggatttcagttctactttgcgttccagcgctcgctggatttcgttttcgacatcaaagagatcgaaaatcggctggcgtcctgtgtaatgctccagcttgcttgtcatctcgggaatgtactcgctggtgaactcaagtaacgcttcgtaagtcaggcgactgtcaacgcgaatgcggtccagttcggcatcggcgaaatcacgcagaacacgctgcgccagcgccagttcgccgtacagctgataacgggtctgcgggcgttttttacgctccataactttggtccagacgcgtttcagataagcggcatcggaggccagttcagcctcgccaaccccttccgctgcggtacggatgataaacccgccctgctcgtcgcaatactctgcgaccacttttttcaggcgttcacgttcactttcgctttcaatacgttgggaaaccccaacgtgagaagcccctggcataaacaccagatagcgagaagggagcgtgatatcggtggtcaggcgcgcacctttagtgccaagcggatctttcaccacctgcaccatcagatcttgcccctgacgaaccagttcgctgatgtcgcgcaccgtgaattgcttttgttcttcacccgccacacattcggtgtgcggcatgatgtcggatgcatgaagaaacgcggctttatccagcccaatatctacaaaagccgcctgcatacccggaagtacacgacttacacgacccttgtagatattgcctactattccgcgtcgcgcctcacgttcaatatgaatttcctgcagaataccgccatcaatatacgccactcgcgtttcgctaggcgttacgtttactaacaattcagccgtcatgtttatcccttttctcacgcagtgcgttaaaattacttaataattcatacgtttcaaccagcggtaagccgactacggcgtgatagctgccatttatcttcctgacaaaacagccacccagcccctgaataccgtatgcacctgctttatctaacggttcatcgctggcgacatagcccgcgatgtcttcgtctgttaacgttctgaaagtcacatcggtgaccaccaggcaatcgagaatgtgctggctgtcggccaacgccactgctgtcatcacctgatgggtctgaccgcttaatttgcgcaacatctgcgccgcatgctctgcgtcgcgcggtttctccagcacttctccgttcaggataacgatagtatccgcacccagcaccgggagatccttcgccgtttgcgcgacacctgcccgtgctttctcgcgcgccagacgcacaacatactgctgcgcgctctcctgcggctgacgctgctcctcaatgcccgtaacaatacgttcaaaggtcacgccaagttgcgcaagtaactcctgacgacgcggagaaccggaagctaaatacagagaagtcatagaaacctttattgcactgcaaactgctgacggactttgcgcatcagcaagaaaatccacggccagagcaccccattgactacactactccagaacacttccggtctgaaagagacgttaatcactaaaaactctgcccagaaaacaataatatccaccaccaggctaagcaacatgacgaccagcgcctgctgccataatgcgaggttgcggaaaagctggtatttcagcgccaccaggtaagcaatgatgctcatcgccaatacgcgtacgccaagcgtgctgccgctgatcagatccagtatggcacccatcacaaaacctgtgcccacatttacgcgatgaggcaaggccaggatccaatacaacaagatgagtaacacccagtttggccggaaaacaatcaggttatccggccagggcatgatttgcagcaacagcgcaatgaggaaagagagccagattacccagcgtccctggctacgatagctcgccactattgccctcccggcgcacgttattgccctcccggcgcacgcgcaggcggttgagcaccactttgcggcggcgtagccctttgtggagagcgattagcagcaggctgtgtcggcgcagcaggcgcagtagctgcatttcctgtcgccggttgctgcggagtcggctgagcgatccccgttgccggttcaggtaactttggccccatcgcgtctgggctaggcaatacctgcggcatcatctgcatcagacgttcattagcaacacgatgcacctcttccggcgtcatcgggttagcgccgttacgatctgccccccacagcagcagcagataacgcaaacgttgcagccctgcagtcggacgcgcctgaatcacagtataagcgcgctgggtatcgagttttacggaagagacaaccgcgaccggatagccttccgggaaacgaccgcccagaccggaagtcaccagcacatcaccaacacgaatatccgtattcgccggcagatgctcaagctgcaaatcatccgtacaaccgttaccggctgcaattacgcggatatcgttgcgcagcacctggattggcagcgcgtgggtcgcatcacaaatcagcagcacgcgactggtcagtttagcgacggccaccacctgaccaacaacacctttgtcgctgatgaccggctggccttcataaacgccattaacgctacctttatcgataacaacttgatcgctataaggatcgttaaccgtggagataacctgagtcaccattttctgctcatcctgacgcagcggggaacccagcagctcgcgcagacgcgcgttctcctgtttgtattgtccaagcatcagcagttcactgtttttcagcaacagttcctgacgtaacgcccggttttcaagttctaattggtcacggctggccagcgtctggcttacgccatccagcaattcacgaggagcattggaaacaaagtagaaaggactgacggcggtatccatataagtacggatttgactgaacgtccccaggcggctgtcggcaataataatgccgagcgccaccagcaccgccagaataaggcgaatctgtaggctcgggccacggctaaaaattggcttcataagttatgcgtattctcgtatcagaccaggcagggtaaacagacacttcccctgcctgcatccgattactcttcgctgaacaggtcgccgccgtgcatgtcgatcatttccagcgctttgccgccaccgcgcgccacacaggtcagcgggtcttcagcaacaacgactggaatgccggtttcttccattaacaaacggtcaaggttacgcagcagtgcgccaccaccggtgagcaccatgccgcgctcggagatgtcggaagccagttccggcgggcactgttccagtgcaaccattaccgcgctcacaataccggtcagcggttcctgcagtgcttcgaggatttcattggagttcagggtaaaaccgcgtggaacaccttctgccaggttacggccacgaacttcgatttcacggacttcatcgcccggataagcgctaccgatttcgtgcttgatacgttctgcggtggcttcaccgatcagagaaccgtaattacgacgcacatagttgatgatagcttcgtcgaaacggtcaccaccaatgcgcacagaagaggagtaaaccacaccgttcaaggagataacagcaacttcagtggtaccaccaccgatatcaaccaccatagaaccggtcgcttcagaaaccggcaggccagcaccaattgcggcagccatcggttcttcaatcaggaagacttcacgggcaccagcgccctgcgcggattcacgaattgcgcggcgttcaacctgggtcgcgccaaccggcacacaaaccagaacgcgcgggcttggacgcataaagctgttgctgtgcacttgtttgatgaagtgctggagcattttttcagtcacgaagaagtcggcgataacgccgtctttcattgggcgaatggcagcaatattgcccggcgtacggcccagcatctgcttcgcgtcatgacctactgcagctacgcttttcggactaccggcacgatcctgacgaatggccaccacggaaggctcattcaatacgatgccttgtccttttacataaatgagggtattcgcagtacccaggtcaatggacaagtcattggaaaacatgccacgaaattttttcaacatactaagggataatcctgaaagctggggcggaaaagaaaatccgcttactttaccaaccacacgcagcagcgacaaggcgcaaaaatcatctgctacggtgaaaattagtgcagttcgtttcctttgttacaaatctctgcctgagtccagaaaggcttaatgcatcagcagcattcctcgcctgtttgcaaccgcgtaaggtcattcatctgcatatgtgctgcaacaatctggcgagcagacaagcacactcccatgagacgcagcgcgcattattctacgtgaaaacggattaaacggcaggttaaacgctgtatctttgactatattttttcacgttagtatcaagtggctgactggacgcgaaaaaatccccttgcccgcctgtaacaccgcgctgaatcagggtctgccactcgcttcggctacgcacgccggtggcgtaaacctgggtgctggtcccggagcaggcttccaccaggctttgaaccagcagctggttctccgttcgcttctcaatgtttctgaccagccccggatggagcttgagtaactcaacattaagttctttgatccaactggtacttaccagcgtcaaaccagcctggttgacggctacccgtacccctaaagcattcactaaacgaataacaggttgtaaacgactgatatgttgacctacatcggcctctgcaagttcaataattatgcgttttcgttgacttttttcacattgcattaacgtatcgcgcagccaacgctgaaaacgcgggcgaatcaggctctcaacggtaacctgaatcgccagattttcctctggccagtaacgcaatagtggaataagacggctgatttgcagacggtcatactcttcgcttaagccaaactgcaagaccatcggcatatgctccgcgctgctaacctcttcattaccatcgaagatgcggcacatgagttcgcgatgatgaacctgaccttcgcgagtaaccgccggtttttgataaaggcgcgggccgccgcgactgagcatttgctcgataagcgtacgccagcgaacattaccgcgtcctttttcaggcaagctgtcatcgtaaatagcccagctattgccgccctgcaatcccgcattacgcgtggcagactctgcatgttccattacctgctcggtatcctgaccactacgccaggcgcagataccaatgtggatcatatcgtcgcgatcgagcattttattgttcggcaaggtatcaacggctttgattaactgaccggcgatgctctctgcctcttttaacgtccggtgcggtaacagcgcagcaaaatcactgcggtggtaacgcgccagcagtgcgccagggtagcgcatcataaatgtgctcagcagattcgtcagagtgaagaactgttcttcaacctggctgtgcccccaggtatcgctcaacatattgaaatccggcagacgaatcatcatcacgatcccgtgggtacctactttctcctgatcttccagtaacgttgctaactgattatcgaaaaagagtcggttattgaggccggttttcacgtcctgggcggcataagagcggatcagcgtatcaagacggctgtgttgttcgcgtgcgttctgaatttcacgaagcagcgtatccagcgcactgctggttctgggcggccattcatagatggttcccaacacattagagccacgctcaccgtttaagatacgagtagcccgggtttccagcaattcttgcccggcaagttgccgttgtaaccagcgtaccgccaggaagagcataacaatgataaagccaatcgcccccgtgagcggcgcggtggtcatcaagctatggaaatagttgcccatcggatcctgataaaccagacgcaagctcatccccggatgctttatcaacggaacgctcagttcgcgaaacagatcgctggagccaactggacgataactaccatttctggccagggtataaacctgtttatcaccatggagcaggtctacacgaacgatatctgcgctcatcattaattcggtaatttgtggccttaatacgctgaagtcattgctcacaaggtgggtatcaatcgccgtcgccaccgcctgaacgcgatgactaaacttatactgaatggcgttgtagaaacttaggctacagcccagcaaagtcacaaaaattgttaacccggtgagcagcgtaacaaaggcgctaaatttcgtcgttaatctcatccttgtgttaactccgatagtgaggaagcgggcatactagcaaatcagatttatctcgcaatttattgcgcttcatcggctttgcttttccattagcgagtatagtcttcagaaattattttccaatccatcatgcacatgaggaccacttatgcaggcgttacttttagaacagcaggacggcaaaactctcgcaagtgtacagactctggacgaaagtcgcctgccggagggcgatgtcacggtcgatgttcactggagcagcctgaactataaagatgcgctggcgattaccggtaagggaaaaatcatccgtaattttccgatgattcctgggatcgattttgccggaactgtacgcaccagcgaagatccgcgttttcatgccggtcaggaggtgttactcactggctggggcgttggtgaaaaccactggggtgggctggcggagcaggcgcgagtgaaaggtgactggctggttgccatgccgcaagggctggacgcgcgtaaagcaatgattatcggtactgccggttttaccgccatgctgtgtgtgatggcgctggaagatgccggtgttcgcccgcaggacggggagattgtcgtgacgggtgccagtggtggcgtcggcagtaccgccgtggcgctgctgcataagttgggttatcaggtcgttgccgtttccggtcgcgaaagtacccatgaatatctgaaaagtttaggtgctagccgtgttctccctcgtgatgagtttgccgaatcccgtcctctggaaaaacaagtctgggctggggcaattgacaccgttggcgacaaagtgctggcaaaagtgctggcgcaaatgaattacggcggctgcgtggcggcctgtggtctggcgggtggttttactctgccaaccacggtcatgccatttattctgcgtaatgtccgtttgcaaggggtggatagtgtaatgacgccaccagaacgccgcgcacaagcctggcagcgactggtcgccgatttaccggaaagtttctatacccaggcggcaaaagagatatctctgagtgaggcaccgaactttgccgaggccatcattaataaccagatccagggtcgcacgctggtgaaggttaactaaccatttagcagggaataataagagagggaactcattttgaaatcattattcaatcggttaacgggaaaagcggttagccggacagctttcgtcgaacaccttggtcaggaagttatacaacatcatccaaactggaaagtcatgatttcgactgaccacaaattgatgcgcattgatactccactaaacagctattattgatacgcctccgtcgcctgttaggtttatgttgctttgcctgggcgacgctacgcttagccccttacttatttctggtaccatggggtgaataatctgattttgtttgactacaaattaatcactcgaacctatttaatgctgagcattgtcaatcggttaattttgcgtgctttagcattcacatctatccagacgatgcagtgaaaattgggtaatccccagcaaccgctgcgtaatgtcgtctatcttgtcgcgatcctggcatccctacattatttgtggtctgtgaagattatctcattgcagcccctcatcttcgcagggctggcttttcagcttttcaccttacgttataagaagttccgtcgatgatggcgctaatttcgtgaattgtgcggcttgttgcaaattacacggtgttgaaggttatttacatgttagctgttgattatcttccctgataagaccagtatttagctgccaattgctacgaaatcgttataatgtgcgacctcgtcctccctgacgcagtttttgcgctgcggaaaaggtgacattggcgcaacgaaggtatattttgttttttgccggaggatagcagcagatcgctgcacaatgtccgtcaagtctaacattgacactctggggcaaaatagaccggcgtcccggcctgctggaatttatcgctatgcatacagctgtcggggcatacgctttacagacggcggtgaaacgcctgtcacaatcacactaaacaaagagtacggaacccactcatggatattcgtaagattaaaaaactgatcgagctggttgaagaaagtggcatctccgaactggaaatttctgaaggcgaagagagtgtacgcattagccgtgcagctcctgccgcaagtttccctgtgatgcaacaagcttacgctgcaccaatgatgcagcagccagctcaatctaacgcagccgctccggcgaccgttccttccatggaagcgccagcagcagcggaaatcagtggtcacatcgtacgttccccgatggttggtactttctaccgcaccccaagcccggacgcaaaagcgttcatcgaagtgggtcagaaagtcaacgtgggcgataccctgtgcatcgttgaagccatgaaaatgatgaaccagatcgaagcggacaaatccggtaccgtgaaagcaattctggtcgaaagtggacaaccggtagaatttgacgagccgctggtcgtcatcgagtaacgaggcgaacatgctggataaaattgttattgccaaccgcggcgagattgcattgcgtattcttcgtgcctgtaaagaactgggcatcaagactgtcgctgtgcactccagcgcggatcgcgatctaaaacacgtattactggcagatgaaacggtctgtattggccctgctccgagtgtaaaaagttatctgaacatcccggcaatcatcagcgccgctgaaatcaccggcgcagtagcaatccatccgggttacggcttcctctccgagaacgccaactttgccgagcaggttgaacgctccggctttatcttcattggcccgaaagcagaaaccattcgcctgatgggcgacaaagtatccgcaatcgcggcgatgaaaaaagcgggcgtcccttgcgtaccgggttctgacggcccgctgggcgacgatatggataaaaaccgtgccattgctaaacgcattggttatccggtgattatcaaagcctccggcggcggcggcggtcgcggtatgcgcgtagtgcgcggcgacgctgaactggcacaatccatctccatgacccgtgcggaagcgaaagctgctttcagcaacgatatggtttacatggagaaatacctggaaaatcctcgccacgtcgagattcaggtactggctgacggtcagggcaacgctatctatctggcggaacgtgactgctccatgcaacgccgccaccagaaagtggtcgaagaagcgccagcaccgggcattaccccggaactgcgtcgctacatcggcgaacgttgcgctaaagcgtgtgttgatatcggctatcgcggtgcaggtactttcgagttcctgttcgaaaacggcgagttctatttcatcgaaatgaacacccgtattcaggtagaacacccggttacagaaatgatcaccggcgttgacctgatcaaagaacagctgcgtatcgctgccggtcaaccgctgagcatcaagcaagaagaagttcacgttcgcggccatgcggtggaatgtcgtatcaacgccgaagatccgaacaccttcctgccaagtccgggcaaaatcacccgtttccacgcacctggcggttttggcgtacgttgggagtctcatatctacgcgggctacaccgtaccgccgtactatgacagtatgatcggtaagctgatttgctacggtgaaaaccgtgacgtggcgattgcccgcatgaagaatgcgctgcaggagctgatcatcgacggtatcaaaaccaacgttgatctgcagatccgcatcatgaatgacgagaacttccagcatggtggcactaacatccactatctggagaaaaaactcggtcttcaggaaaaataagactgctaaagcgtcaaaaggccggattttccggccttttttattactggggatcgacaacccccataaggtacaatccccgctttcttcacccatcagggacaaaaaatggacactcgttttgttcaggcccataaagaggcgcgctgggcgctggggctgacccttttgtatctggcagtttggttagtagccgcttacttatctggcgttgcccccggttttaccggctttccgcgctggtttgagatggcctgcatcctgacgccgctgctgtttattggactgtgctgggcgatggtgaaatttatctatcgcgatatcccactggaggatgacgatgcagcttgaagtaattctaccgctggtcgcctatctggtggtggtgttcggtatcagcgtttatgcgatgcgtaaacggagcaccggcaccttccttaatgagtatttcctcggcagccgctctatgggcggtattgtgctggcgatgacgctcaccgcgacctatatcagtgccagtagctttatcggcgggccaggagctgcttataaatacgggctgggctgggtattgctggcgatgattcagcttcctgcagtctggcttagtctcggtattctcggcaagaagtttgcgattcttgcgcgccgctacaatgcagtgacgctgaacgatatgctgtttgcccgctaccagagtcgtcttctggtgtggctggcgagtttgagtttgctggttgcgttcgttggtgcgatgaccgtgcagtttatcggcggtgcgcgcctgctggaaaccgcggcgggtattccttatgaaaccgggctgctgatttttggtatcagcattgcgttatataccgcctttggtggctttcgcgccagcgtgctgaacgacaccatgcaagggcttgtgatgctgattggcaccgttgtgctgcttattggcgtagtacatgccgctggcggcttaagtaacgcagtacagaccttgcaaaccatcgatccgcaactggttacgccacaaggcgctgacgatattctgagccctgcctttatgacgagcttctgggtactggtgtgttttggcgtgattggcctgccgcatactgcggtgcgctgtatctcttataaagacagcaaagccgtacatcgggggatcatcatcggtacgattgtggtcgcaattctgatgttcggtatgcacctggccggagcgttaggtcgggcggtgatccccgatctcaccgtaccggacctggtgatcccaacgttaatggtaaaagtgctgccaccgtttgctgccgggatcttcctggctgcaccgatggctgcgatcatgagcacaattaacgcccaactgctgcaaagttccgctacgatcattaaagatctctatctgaatatccgtccggatcaaatgcaaaacgagacgcgtctgaagcggatgagcgcggtaattacgttagttctcggcgcgttgctgctgcttgccgcctggaagccgccagaaatgatcatctggctgaatttgttggccttcggtgggctggaagccgttttcctgtggccgctggtgctgggtctttactgggaacgcgccaacgccaaaggcgcgctaagtgcgatgatcgttggcggcgtgctgtatgccgtactcgcgacgctgaatattcagtacctgggcttccaccctatcgtgcccagcttactactaagtttgctggctttcctggtcggaaaccgtttcggtacatccgtcccgcaagctaccgttttgactactgataaataaagagttttgccatgccttggatccaactgaaactgaacaccaccggcgcgaacgcggaagatcttagcgatgcgctgatggaagcgggtgccgtttctatcacttttcaggatacccacgatacgccagtatttgaaccgctgccgggcgaaacgcgcctgtggggcgacaccgatgtgattggtctgttcgacgctgaaaccgatatgaacgacgtggtggcgattctggaaaaccatccgctgctcggcgcaggcttcgcgcataaaatcgaacaactagaagataaagactgggagcgcgaatggatggataatttccacccgatgcgctttggtgaacgactgtggatctgccctagctggcgtgatgtgccggacgaaaacgccgtcaacgtgatgttagatccagggctggcgtttggtacgggtacccatccaaccacctctctgtgcctgcaatggctcgacagcctcgatttaaccggtaaaacagtcatcgactttggctgtggttccggcattctggcgatcgcggcgctgaaactgggtgcagcaaaagccattggtattgatatcgatccgcaggcgattcaggccagccgcgataacgccgaacgtaatggcgtttctgaccgtctggaactctacttaccgaaagatcagccagaagaaatgaaagccgacgtggtggtcgctaacatccttgcaggcccattacgtgaactggcaccgttaatcagcgtcctgccggttagtggcggtttgctgggcctttccggtattctggcaagccaggcagagagcgtttgtgaagcttatgccgatagcttcgcactggacccggtcgtggaaaaagaagagtggtgccgtattaccggtcgtaagaattaaccttcgcatcgccgtagggtgacgcggggcgaagtgcgagcaagctcacaaaaggcacgtaaatttgccgattatttacgcaaatttgcgtgccaaaattttcattcataaagaaaaattgagaacttactcaaatttctttgagtgtaaattttagtcactattttctaatatgatgatttttatgagtaattatcgcaccacgctcattttaaatgcaattctttgatccatctcagaggattggtcaaagtttggcctttcatctcgtgcaaaaaatgcgtaatatacgccgccttgcagtcacagtatggtcatttcttaactcatgcgcatcggacaatatcagctcagaaatcgcctgatcgcagcgcccatggctggcattacagacagaccttttcggacgttgtgctacgagatgggagccggattgacagtatccgagatgatgtcttctaacccacaggtttgggaaagcgacaaatctcgtttacggatggtgcacattgatgaacccggtattcgcaccgtgcaaattgctggtagcgatccgaaagaaatggcagatgcagcacgtattaacgtggaaagcggtgcccagattattgatatcaatatgggttgcccggctaaaaaagtgaatcgcaagctcgcaggtagtgccctcttgcagtacccggatgtcgttaaaagcatccttaccgaggtcgtcaatgcagtggacgttcctgttaccctgaagattcgcaccggctgggcaccggaacaccgtaactgcgaagagattgcccaactggctgaagactgtggcattcaggctctgaccattcatggccgtacacgcgcctgtttgttcaatggagaagctgagtacgacagtattcgggcagttaagcagaaagtttccattccggttatcgcgaatggcgacattactgacccgcttaaagccagagctgtgctcgactatacaggggcggatgccctgatgataggccgcgcagctcagggaagaccctggatctttcgggaaatccagcattatctggacactggggagttgctgcccccgctgcctttggcagaggttaagcgcttgctttgcgcgcacgttcgggaactgcatgacttttatggtccggcaaaagggtaccgaattgcacgtaaacacgtttcctggtatctccaggaacacgctccaaatgaccagtttcggcgcacattcaacgccattgaggatgccagcgaacagctggaggcgttggaggcatacttcgaaaattttgcgtaaacagaaataaagagctgacagaactatgttcgaacaacgcgtaaattctgacgtactgaccgtttctaccgttaactctcaggatcaggtaacccaaaaacccctgcgtgacagcgttaaacaggcactgaagaactattttgctcaactgaatggtcaggatgtgaatgacctctatgagctggtactggctgaagtagaacagcccctgttggacatggtgatgcaatacacccgtggtaaccagacccgtgctgcgctgatgatgggcatcaaccgtggtacgctgcgtaaaaaattgaaaaaatacggcatgaactaattcaggttagctaaatgcttgattaaaaaggcgctactcggcatggggaagcgccttttttataggtgtcacaaagggagtgaccatgagaacaggatgtgaaccgacccggtttggtaatgaagctaagaccattattcacggtgatgcgcttgccgaacttaaaaagatccccgccgaaagtgtcgatctgatctttgccgacccaccatataacatcggtaaaaattttgatggtctgatcgaagcctggaaagaagatctgtttatcgactggctgtttgaagtgattgcagagtgccaccgcgttctgaaaaagcagggcagcatgtacatcatgaacagtacggaaaacatgccctttatcgatctccagtgccgcaagctttttaccatcaaaagtcgcatcgtctggagttatgacagttctggagtgcaggcgaaaaaacactacggctccatgtacgaacccatcctgatgatggtgaaagacgcaaagaactacacattcaacggtgatgctattctggtagaagccaaaaccggaagccagcgcgcgttgatcgattatcgcaaaaatcctccacagccttacaatcatcaaaaagtaccgggtaacgtttgggattttccgcgcgtgcgttatttgatggatgaatatgaaaaccacccgacgcaaaaaccggaagccttactgaaacgcattattctcgcctcttccaacccaggcgatatcgttctcgacccgtttgctggtagctttactaccggtgccgtagccatcgccagcggacgaaaattcattggtattgagatcaacagcgagtacatcaaaatggggcttcgacggctggatgtcgcgagccattactctgcggaagaactggcgaaagtgaaaaaaagaaagaccggcaacctgagtaaacgaagccggttaagcgaagttgaccccgatctcattacaaagtaaaggatgtgtaagcctggttttcagattattcatttcgtgtatatttcctgccagacttggttaaacatgcacaggctcaggtaatgattcgcaagtattggtggctcgtcgttttcgctgtcttcgtttttctgtttgatactttactgatgcagtggattgaactgctggcaacagaaacagacaaatgccgcaatatgaacagtgttaatccactaaaactggttaactgtgacgaactgaattttcaggacagaatgtgaatttacatgacacttaattcattcgtttgatgaattaatttcgttatgttttcatctggcatgaacattcttaatacgttatcgaccagagcgggggcttgtttataaagatcataacccgccatattcattaaccagttttgaacaattccgctgaaggcaccatcaataataatcatcacaacatctaaatcgaggttatttgctacacaaccttgttgctgacacgcctgcaatacttcgcggagagtctgcggattaaagcccatcttttcgcgtatcactccctcggccagcatctcatcattaaattcacatttgtgatataagattttcagcaacgcctgctggcggggaattttggcaatatattgcaagccgacaatcaatttttcacgcaattgttgaaacgggtcatgctctaatccagccgtcaagtgttcctggattaactcccgcaaactaggctgttgcaaccacatctcattaaacagttgagtcttgttttcgaagtgccagtagatagcgccacgcgtaacgttagcggcgtcggcaatgtcgttgagcgtcgtcttgcttacgccatgctgcgcaaactgggcgatggcagtttcaatcagttcttgccgggtcttcagagcttcggctttggttctttttgccatgattaattattcaggaaataaatatattcgacacagagtgagaaaatagcgaaggttaatctatcacctaatgtgtatttatacgagaggctaatattgagttgctataaatcgttaaataaataatatatattatttacctaagatacattcactacatcaatatatatttcaatttacgaggttttaattctgcctctttcaacccgcgtcaaaataaaacagtagaatattaatctttttttgtgtttatgtgccttgagatgcctgtattcataactattccttacatcgacgaatgataatttgtaggatagcgaactgtatttttctttctgcgagttaacgcgttgcctttttgggtaaataacgcgcttttggttttttgaggaatagtaatgacgaaacatgccaggtttttcctcctgccctcctttattctgatctccgcggctttaatcgccggttgtaacgataagggagaagagaaagctcacgtcggtgaaccgcaggttaccgttcatattgtaaaaacggccccgttagaagttaagactgaattaccaggccgcaccaatgcttatcgtatagccgaagttcgcccacaggttagcgggatcgtactgaatcgcaatttcactgaaggcagcgatgtgcaagcaggccagtccctgtaccagatcgatcccgcgacctatcaggcaaattatgacagcgcgaaaggcgaactggcgaaaagtgaagccgccgccgccatcgcgcatttgacggtaaaacgttacgttccgctcgtgggtacgaaatacatcagccagcaggagtacgaccaggccattgctgatgctcgtcaggccgatgccgccgtgattgccgcaaaagccacagtcgaaagcgctcgcatcaatcttgcttataccaaagtcactgcgccaattagcggacgtatcggcaaaagcactgtgaccgaaggcgctcttgtcactaatgggcaaacgactgaactggcgactgtccagcagctcgatcctatctacgttgatgtgacccaatccagcaacgattttatgaggctgaagcaatccgtagagcaaggaaatttgcataaggaaaacgccaccagcaacgtagagttggtcatggaaaacggtcaaacctatcccctgaaaggtacgctgcaattctccgatgtgaccgttgatgaaagcaccggctccataaccctacgtgctgtcttccctaacccgcaacatacgcttttgccgggtatgtttgtgcgtgcacggattgatgaaggcgtccaacctgacgccattcttatcccgcaacaaggcgttagccgcacaccgcgtggtgatgcaaccgtgctgattgttaacgataaaagtcaggttgaagcgcgccctgtcgttgccagtcaggcgattggcgataaatggttgattagtgaaggactgaaatctggcgatcaagtcattgtcagcggcctgcaaaaagcgcgtccgggagagcaggttaaagccactaccgatacccccgcagatactgcaagcaagtaaggtaatctgacatggcaaacttttttattcgacgaccgatatttgcatgggtgctggccattattctgatgatggcgggcgcactggcgatcctacaattgcccgtcgctcagtatccaacaattgcaccgcctgcggtttctgttagtgcaaactatccgggcgctgatgcgcagaccgtgcaggatacggtgacgcaggttatcgaacagaatatgaacggtatcgataacctgatgtatatgtcctccaccagcgattccgccggtagcgtgacaattacccttaccttccagtccgggaccgatcctgatatcgcgcaagtgcaggtgcagaacaaactccagctcgccacgccgttgctgccgcaggaggttcagcagcaggggatcagtgttgaaaagtccagtagcagctatttgatggtggcgggctttgtctctgataacccaggcaccacacaggacgatatcagcgactatgtggcctctaacgttaaagatacgcttagccgtctgaatggcgtcggtgacgtacagcttttcggcgcacagtatgcgatgcgtatctggctggatgccgatctgctaaacaaatataaactgacaccggttgatgtgattaaccagttgaaggtacagaacgatcagatcgctgccggacagttgggcggaacgccagcgttaccagggcaacaattgaacgccagcattattgctcagacgcggtttaaaaatccggaagaattcggcaaagtgaccctgcgcgtaaacagtgacggcagcgtggtacgcctgaaagatgtcgcacgggttgaacttggcggtgaaaactataacgttatcgctcgtatcaacggaaaaccggcggcgggcctggggattaagctggcaaccggcgcgaatgctctcgataccgcgaaagccattaaggcaaaactggcggaattacagccattcttcccgcagggaatgaaggttctctacccttatgacaccacgccattcgtccagctttctattcacgaagtggtaaaaacgctgttcgaagccattatgctggtgttcctggtgatgtatctgttcttgcagaatatgcgagcaacgctgatccccgccattgcggtacccgtggtgttgttagggacgtttgccatcctcgccgcttttggttactccatcaacacactaacgatgttcgggatggtgcttgccatcgggctgctcgtcgatgatgcgatagtggtggtggagaacgtcgagcgcgtgatgatggaggataagctcccgccaaaagaagcgacggaaaaaagcatgagccaaattcagggcgcactggtgggtatcgcgatggtgctgagtgcggtatttattccgatggcattcttcggcggttctactggggcaatttatcgccagttctctatcaccatcgttagcgcaatggcgctttctgttctggtggcattgattcttacccctgcgttatgtgcaacgctgcttaaacccgtctctgctgagcatcacgaaaataagggcggtttcttcggttggtttaataccaccttcgatcatagcgttaaccactacaccaacagcgtcggcaaaatcctcggatccacaggacgatatttactgatctatgcgctgattgttgcaggaatggtggtgttgtttttacgtcttccgtcttccttcttacctgaagaggatcagggtgtctttctgaccatgattcagttacccgctggcgcgacgcaagagcggacgcaaaaagtgttggatcaagttacggattactatctgaagaacgagaaagcgaacgttgaaagtgtctttacggttaacggctttagcttcagcggccaggcacaaaacgccggtatggccttcgtcagtctgaaaccgtgggaagagcgtaatggtgacgaaaacagtgcggaagcggtaatccatcgtgccaaaatggaattgggcaagatccgcgacggttttgtcattccattcaatatgccagccattgttgaactgggcacggcaacgggtttcgactttgagttaattgatcaggctgggctgggtcacgatgccctaacccaggcccgtaaccagttgcttggtatggcggcgcaacatcctgccagcttagtcagcgtgcgccctaatggcctggaagacaccgcgcagtttaaactggaagttgaccaggaaaaggcgcaggcattaggtgttagtctttctgacatcaatcagaccattagtacggcgctgggtgggacttacgttaacgacttcatcgaccgtggccgcgtgaaaaagttgtatgttcaggcggatgccaaattccgtatgctgccagaagatgtcgataaactttatgtccgcagcgccaacggcgaaatggtgccattcagcgcctttaccactagtcattgggtgtatggctctccgcgactggaacgctacaacggtctgccgagtatggagattcagggggaagccgcgccaggaaccagttccggcgatgccatggcgttgatggaaaaccttgcgagtaaattacctgcgggcattggttatgactggacgggtatgagctatcaggaacgcttaagcggaaaccaggctcccgctctggtagcaatttcctttgtggttgttttcctgtgccttgctgcactctatgaaagctggagtattcctgtcagcgttatgttggtagtgccgttagggattgtcggcgtgctgctggcggcgacactctttaatcaaaaaaatgacgtctactttatggtgggcttgctaacgacaattggcttgagcgccaaaaacgctattttgatcgttgagttcgctaaagatctcatggagaaagagggtaaaggtgttgttgaagcgacactgatggcagtacgtatgcgtctgcgtcctatcctgatgacctctctcgcctttattctcggcgtattaccgctagctatcagtaacggtgccggcagtggcgcgcagaacgctgtgggtatcggggtaatgggaggaatggtctctgcaacgttgctggcaatcttcttcgtaccggtgttctttgtggtgatccgccgttgctttaaaggataaatcagaaacataaaggcgctttcgggtgcctttattatttccagtgaaacccataaaaattaataagatattcttctgctcactctttaaaagctttctatagttcccgctcccttcactatttttacaattcacataatttgtcattattcattccgcaagatttataacctccggtgataaaatggcattcagctcgttaataagagagttaacttattaagcgttagcgtttattactgaggtaacaccatgaaaagattaattcctgtggcattgctcaccgcattgctggcgggctgtgctcacgatagcccctgcgttccggtttatgacgatcagggtcgtctggttcacaccaatacctgtatgaaaggcacgactcaggataactgggaaacggctggggctattgccggcggggcagctgctgttgctggcctgacgatggggatcatcgctctaagcaaataactgaacagggcgcggagttccgcgctctttttaacgatacagtatctctccataagataaaatattgctatattctgctgggtaattccctgctgatttagcatgttacatcgcgttatttcgctgctttcgaaataacgcatcaatttaattttcacacttcccaccagaaatatactcacgctaacaatcattattctgcttagtaaaacacgcgtaaatattttgcgccaaaatgtggcgcatgtttcattttcgcaccattgcggggcgctgtttttattatttcctgtctacactcagcttattgcgacgcgaaatcgtgcgcaaaagctggcactacttttgcttataagaggatggccacagacaggtaaaagacgtttcccaaacgtcctataacgataattttcgcctcacaggaagcattatgaaaaagatgatgatagccacactggctgccgccagcgtgctgcttgccgttgcaaatcaggcgctgctggcgcgacgcttgatgccgttcagaaaaaaggttttgtgcaatgcgggatcagtgatggattacctgggttctcttatgccgatgctgacggtaagtttagtggtattgatgttgatatttgtcgtggtgttgccgctgctgtatttggtgacgacacgaaagtgaaatataccccgctcactgcaaaagaacgcttcaccgctttacagagtggggaggtggatttgctctcccgtaatacgacctggactagttctcgcgatgccgggatgggaatggcatttaccggcgtcacttattacgacggcattggcttcctgacgcacgataaagcggggctaaaaagcgcgaaagaactggatggcgctaccgtctgtattcaggcgggtactgataccgaactcaacgtcgccgactacttcaaggcaaacaatatgaagtacacaccggtgactttcgatcgctctgacgaaagtgcgaaggcactggaatctggtcgctgcgatacgctggccagcgatcaaagtcaactgtatgccctgcgcatcaaattaagcaacccagctgaatggattgtcttaccggaagttatcagtaaagaaccgcttggtccggtagttcgtcgtggcgatgatgaatggttcagcattgtacgctggacgcttttcgccatgctgaatgctgaagagatgggcatcaattcccagaacgtcgatgaaaaagcggctaatccagcaacgcctgatatggcacatctgctgggtaaagaaggcgattacggcaaggatctgaagctggataataaatgggcctataacatcatcaaacaggtgggtaactacagcgaaatttttgagcgtaacgtaggtagtgaaagcccgctgaaaattaaacgtgggcaaaataatctctggaataacggcggtattcagtacgcaccgcccgtgcgttaagtcggtgtgaggtaacgagcgtcgctacggcggcgctctcttcagcgttatgctttccgaggtttctatgtctcatcgccgcagtaccgttaaaggcagtctctcttttgccaaccctacggttcgcgcctggttattccagatccttgccgttgttgctgttgtcggcattgttggttggttatttcacaacactgtaacgaatctcaataatcgtggcattactagtggttttgcctttctggatcgcggcgctggcttcggtattgtccagcatttgatcgattaccagcagggcgacacctacggacgcgtttttattgtcggcttactcaatacgctactggtttctgcattgtgtattgtgttcgcttctgttttgggcttctttatcggtctggcgagacttagcgataactggctgctacgaaagctttccacaatttatattgagatcttccgtaatattcccccgctgctgcaaatcttcttctggtactttgccgtgttgcgcaatttgcccggaccacgccaggctgtgagcgcgtttgatctggcctttttgagcaatcgtgggctttatattccgagtccgcagctgggagacggatttattgcgtttatcctggctgttgttatggctatagtcctttctgttgggctattccgctttaataaaacataccagataaagaccggacaactgcgccgcacctggccgatcgccgcagtgttgatcattggtttgcctttactggcgcaatggctttttggcgcagcactacactgggatgtcccagccctacgaggctttaacttccgcggcgggatggttttaattcctgaactggcagccttaacgctggcacttagcgtttatacatctgcatttatcgccgagattatccgcgctgggatccaggcagtgccttatggtcaacatgaagcggctcggagtctgggattacccaacccggttacgctacgccaggtcattattccccaggcattgcgggtgattattccaccgttaaccagccagtatctcaacatcgtcaaaaactcctctcttgccgccgctattggctatcccgatatggttagcctgtttgccggcaccgtgctgaatcagacggggcaagccatcgagacgatagccatgaccatgagcgtctatctgattatcagcctgactatcagcctgctgatgaatatctataaccgccgcatcgcgatcgttgaacgctaaggagtcatgatgacaaaagtattgctgtctcatcccccgcgcccggcgagccataacagtagccgcgcgatggtgtgggtgcgaaaaaatctgttctccagctggagcaatagcctgctgactattggctgcatatggttgatgtgggaactgatcccaccgttgctgaactgggcatttttgcaggctaactgggttggcagtacgcgtgccgactgcacaaaagccggtgcctgttgggtcttcatccacgaacgatttggtcagtttatgtatgggctttacccacacgaccaacgctggcgaattaacctcgcattactgattgggcttgtgagcatcgcaccaatgttctggaaaatactcccgcatcgcggtcgctatattgcggcctgggcggtgatttacccactgattgtctggtggctgatgtatggcggtttttttgctcttgagcgggttgaaacccggcaatggggcgggctgacgctaactttaattattgcaagtgttgggattgcgggggcgctaccgtgggggatcttactggcgttaggtcgccgctcccatatgccgattgtgcgtatcttaagcgtcatttttatcgaattctggcgcggcgtgccgctgattaccgttctgtttatgtctagcgtcatgctgccgttgtttatggcagaaggcaccagtatcgacaaattgatccgcgcgctggttggcgtgatcctgtttcagagtgcatatgttgcggaagtcgtgcgaggtggattacaggcgctgcctaaagggcaatatgaagcggcagagagcctggcgttgggttactggaaaactcaggggctggttattctgccacaggcgttgaagctggtaattcctgggctggtaaataccatcatcgcactcttcaaagataccagcctggtgatcattatcgggttgttcgatcttttcagtagcgttcagcaggcaaccgttgatcccgcctggttgggtatgagcacggaagggtatgttttcgccgcgctgatctactggatcttctgtttcagcatgagccgctatagccagtatctggaaaaacgttttaacaccgggcgtacaccgcattgaggacactatgagccaaattttactgcaacctgctaacgcgatgattacgctggaaaacgtcaataaatggtatggacaattccatgttttgaaaaatataaatttaaccgtgcaaccgggagaacggatcgttctgtgtggccctagtggttccggtaaaagcacaaccattcgttgtattaatcatctggaagaacatcaacagggacggatcgtggtagatggcatcgaacttaatgaagatatccgcaatattgagcgcgtcaggcaggaagtgggaatggtctttcagcatttcaatctcttccctcatctgaccgttttacagaactgtaccctggcaccgatttgggtacgcaagatgcctaagaaagaggctgaagatctggcggtgcattacctagagcgggtgagaattgccgaacatgcgcataagtttcccggacagattagtggtggtcagcagcaacgcgttgccattgcgcgtagcctgtgtatgaagccgaaaattatgttgtttgatgagccaacgagcgcgctcgatcctgagatggtgaaagaggtgctggatacgatgattgggctggcgcagagcggtatgacaatgttgtgtgtaacacatgagatggggtttgcacgaaccgtcgctgaccgggtaatttttatggatcgtggggaaatagtggagcaagctgcacctgatgaattttttgcgcatcctaaaagtgagcgtacgagggcatttttaagccaggtaatccattaattgaatgttagttcgaaaagcaaaaaggccatcctttcggatggcctttcgcttgatttgatgtctggcagtttatggcgggcgtcctgcccgccaccctccgggccgttgcttcgcaacgttcaaatccgctcccggcggatttgtcctactcgggagagtgttcaccgacaaacaacagataaaacaaaaggcccagtcttccgactgagccttttgttttatttgatgtctggcagttccctactctcgcatggggagaccccacactaccatcggcgctacggcgtttcacttctgagttcggcatggggtcaggtgggaccaccgcgctactgccgccagacaaattcttttctaatctgccgaactttaacctaaaaagtggtgctgatacccagagtcgaactggggacctcacccttaccaagggtgcgctctaccaactgagccatatcagcacgctaaatttgatgcctggcagttccctactctcgcatggggagaccccacactaccatcggcgctacggcgtttcacttctgagttcggcatggggtcaggtgggaccaccgcgctacggccgccaggcaaattctgttttatcagaccgcttctgcgttctgatttaatctgtatcaggctgaaaatcttctctcatccgccaaaacagcttcggcgttgtaaggttaagcctcacggttcattagtaccggttagctcaacgcatcgctgcgcttacacacccggcctatcaacgtcgtcgtcttcaacgttccttcaggacccttaaagggtcagggagaactcatctcggggcaagtttcgtgcttagatgctttcagcacttatctcttccgcatttagctaccgggcagtgccattggcatgacaacccgaacaccagtgatgcgtccactccggtcctctcgtactaggagcagcccccctcagttctccagcgcccacggcagatagggaccgaactgtctcacgacgttctaaacccagctcgcgtaccactttaaatggcgaacagccatacccttgggacctacttcagccccaggatgtgatgagccgacatcgaggtgccaaacaccgccgtcgatatgaactcttgggcggtatcagcctgttatccccggagtaccttttatccgttgagcgatggcccttccattcagaaccaccggatcactatgacctgctttcgcacctgctcgcgccgtcacgctcgcagtcaagctggcttatgccattgcactaacctcctgatgtccgaccaggattagccaaccttcgtgctcctccgttactctttaggaggagaccgccccagtcaaactacccaccagacactgtccgcaacccggattacgggtcaacgttagaacatcaaacattaaagggtggtatttcaaggtcggctccatgcagactggcgtccacacttcaaagcctcccacctatcctacacatcaaggctcaatgttcagtgtcaagctatagtaaaggttcacggggtctttccgtcttgccgcgggtacactgcatcttcacagcgagttcaatttcactgagtctcgggtggagacagcctggccatcattacgccattcgtgcaggtcggaacttacccgacaaggaatttcgctaccttaggaccgttatagttacggccgccgtttaccggggcttcgatcaagagcttcgcttgcgctaaccccatcaattaaccttccggcaccgggcaggcgtcacaccgtatacgtccactttcgtgtttgcacagtgctgtgtttttaataaacagttgcagccagctggtatcttcgactgatttcagctccacgagcaagtcgcttcacctacatatcagcgtgccttctcccgaagttacggcaccattttgcctagttccttcacccgagttctctcaagcgccttggtattctctacctgaccacctgtgtcggtttggggtacgatttgatgttacctgatgcttagaggcttttcctggaagcagggcatttgttgcttcagcaccgtagtgcctcgtcatcacgcctcagccttgattttccggatttgcctggaaaaccagcctacacgcttaaaccgggacaaccgtcgcccggccaacatagccttctccgtccccccttcgcagtaacaccaagtacaggaatattaacctgtttcccatcgactacgcctttcggcctcgccttaggggtcgactcaccctgccccgattaacgttggacaggaacccttggtcttccggcgagcgggcttttcacccgctttatcgttacttatgtcagcattcgcacttctgatacctccagcatgcctcacagcacaccttcgcaggcttacagaacgctcccctacccaacaacgcataagcgtcgctgccgcagcttcggtgcatggtttagccccgttacatcttccgcgcaggccgactcgaccagtgagctattacgctttctttaaatgatggctgcttctaagccaacatcctggctgtctgggccttcccacatcgtttcccacttaaccatgactttgggaccttagctggcggtctgggttgtttccctcttcacgacggacgttagcacccgccgtgtgtctcccgtgataacattctccggtattcgcagtttgcatcgggttggtaagtcgggatgacccccttgccgaaacagtgctctacccccggagatgaattcacgaggcgctacctaaatagctttcggggagaaccagctatctcccggtttgattggcctttcacccccagccacaagtcatccgctaatttttcaacattagtcggttcggtcctccagttagtgttacccaaccttcaacctgcccatggctagatcaccgggtttcgggtctataccctgcaacttaacgcccagttaagactcggtttcccttcggctcccctattcggttaaccttgctacagaatataagtcgctgacccattatacaaaaggtacgcagtcacacgcctaagcgtgctcccactgcttgtacgtacacggtttcaggttctttttcactcccctcgccggggttcttttcgcctttccctcacggtactggttcactatcggtcagtcaggagtatttagccttggaggatggtccccccatattcagacaggataccacgtgtcccgccctactcatcgagctcacagcatgtgcatttttgtgtacggggctgtcaccctgtatcgcgcgcctttccagacgcttccactaacacacacactgattcaggctctgggctgctccccgttcgctcgccgctactgggggaatctcggttgatttcttttcctcggggtacttagatgtttcagttcccccggttcgcctcattaacctatggattcagttaatgatagtgtgtcgaaacacactgggtttccccattcggaaatcgccggttataacggttcatatcaccttaccgacgcttatcgcagattagcacgtccttcatcgcctctgactgccagggcatccaccgtgtacgcttagtcgcttaacctcacaacccgaagatgtttcacttcagagttgcgaaaatttgagagactcacgaacaactttcgttgttcagtgtttcaattttcagcttgatccagatttttaaagagcaaaacttcgcagtgaacctttgcaggtacactctgaagtattttttatttaatcactacagagatggtggagctatgcgggatcgaaccgcagacctcctgcgtgcaaagcaggcgctctcccagctgagctatagccccataacatgtagttaaaacctcttcaaatttgccgtgcaaatttggtaggcctgagtggacttgaaccaccgacctcacccttatcaggggtgcgctctaaccacctgagctacaagcctgtagaggttttactgctcattttcatcagacaatctgtgtgagcactgcaaagtacgcttctttaaggtaaggaggtgatccaaccgcaggttcccctacggttaccttgttacgacttcaccccagtcatgaatcacaaagtggtaagcgccctcccgaaggttaagctacctacttcttttgcaacccactcccatggtgtgacgggcggtgtgtacaaggcccgggaacgtattcaccgtggcattctgatccacgattactagcgattccgacttcatggagtcgagttgcagactccaatccggactacgacgcactttatgaggtccgcttgctctcgcgaggtcgcttctctttgtatgcgccattgtagcacgtgtgtagccctggtcgtaagggccatgatgacttgacgtcatccccaccttcctccagtttatcactggcagtctcctttgagttcccggccggaccgctggcaacaaaggataagggttgcgctcgttgcgggacttaacccaacatttcacaacacgagctgacgacagccatgcagcacctgtctcacggttcccgaaggcacattctcatctctgaaaacttccgtggatgtcaagaccaggtaaggttcttcgcgttgcatcgaattaaaccacatgctccaccgcttgtgcgggcccccgtcaattcatttgagttttaaccttgcggccgtactccccaggcggtcgacttaacgcgttagctccggaagccacgcctcaagggcacaacctccaagtcgacatcgtttacggcgtggactaccagggtatctaatcctgtttgctccccacgctttcgcacctgagcgtcagtcttcgtccagggggccgccttcgccaccggtattcctccagatctctacgcatttcaccgctacacctggaattctacccccctctacgagactcaagcttgccagtatcagatgcagttcccaggttgagcccggggatttcacatctgacttaacaaaccgcctgcgtgcgctttacgcccagtaattccgattaacgcttgcaccctccgtattaccgcggctgctggcacggagttagccggtgcttcttctgcgggtaacgtcaatgagcaaaggtattaactttactcccttcctccccgctgaaagtactttacaacccgaaggccttcttcatacacgcggcatggctgcatcaggcttgcgcccattgtgcaatattccccactgctgcctcccgtaggagtctggaccgtgtctcagttccagtgtggctggtcatcctctcagaccagctagggatcgtcgccttggtgagccgttaccccaccaacaagctaatcccatctgggcacatccgatggcaagaggcccgagggtccccctctttggtcttgcgacgttatgcggtattagctaccgtttccagtagttatccccctccatcaggcagtttcccagacattactcacccgtccgccactcgtcagcgaaacagcaagctgtttcctgttaccgttcgacttgcatgtgttaggcctgccgccagcgttcaatctgagccatgatcaaactcttcaatttaaaagtttgatgctcaaagaattaaacttcgtaatgaattacgtgttcactcttgagacttggtattcatttttcgtcttgcgacgttaagaatccgtatcttcgagtgcccacacagattgtctgataaattgttaaagagcagttgcgacgcggctttcagctcactgtcgcgaggtggcgtatattacgctttcctctttcagagtcaaccctgaatttcaggatttttttctcttcgttgttccgaccatcctgtgaagtgtttcacgttgtcgtctcaacggaggcgcattatagggatcccaattttttgcacaagtatttttttgatctttttttctgtttgttgttttttcaccctttttgctgcaatcgcacacaaaacggtgcttttttgcatactaaaagacttgcacaaggccaataatgcccccaaagtcattagtaaatcatttattgctgaggtaagtatgtctgatgttttacgcccataccgcgatctttttccacaaatcggtcagcgcgtaatgatcgacgatagcagtgtcgtgattggtgacgttcgtctggctgatgatgtggggatctggccgctcgttgtgattcgtggagatgtacattatgtacagatcggagcacgcaccaatatccaggatggcagtatgttgcatgtcactcataaatccagctacaacccagatggcaacccattaaccattggcgaagatgtcactgttggtcacaaggtgatgctccacggctgcaccattggcaatcgagttttggttgggatgggcagtattttacttgatggcgcaatagtagaagatgatgtgatgattggtgcgggtagtctggtcccacaaaataaacggctggagagcggatatctgtatctcggtagccccgtcaaacagatccgcccgttaagtgatgaagagaaggctgggttacgctattccgcgaataattacgtgaaatggaaggacgaatatctggatcagggtaaccagacccagccttgatcatcttcactttgttcctgaattaagttttccgcttcttcttccaggtcccagcgatgctgacgaaaactcgctaaccactgttctggcgtatctccagtaaagcgatacgccagactctcgccagagatcgcgcatgtcagttgcataccattcacgagagcgggaaaacatacacattttttattctcgtcccactcttccctgtccggaaactggatggcctgattcacgcggacaattcctcctgcaattgctttataactggttctacgtcaggcagaacaccgtgccagagaagaaaggcatgagccgcctgtgccaccagcattcctaaaccatcagcattacgcttactgcctcgctgctcacaccatgccagaaaaggagtttttcctttctgatagaacatgtcatagcaataaatgcctggatgaatgaggctactcgggatcgccggaatatcaccactgatgccactggatgttgcattaataatgagatcaaactcatgaccttccagttcgtccatactcaacgcctgaatactgccagtgtgcgcaaacaatttagccaactcttccgcgcgggataccgtccgattagttattgtcaccgcacagtccagggaaaggagtggcagtagtacgccgcgagatgctccaccagcgccgataagcagaatacgtaaaccagggcggataaaagacagacgttccagatcgcttaacaagcctacaccatcggtattgtcacccagcaggcgtccatcttctaaccgcatgagggtattaacagcaccagccaacgctgcccgttcagtaagctcatccgctctggcaaaagcctcttctttaaaaggcaccgtcacattcgcacctttaccaccagcactaaagaaagcgttcagtgtgttgatgaaatcattgatgggtgccaacacgcgcccatagggatgttcaatattcagttgctgagcaaattgctgatgaatgaatgggcttttgctgtgggctatcggattaccaaaaacagcataggtttccattatgttacccctgtcgaaacagttcacccgtcagggcatcgcggatttcactaggatttaaacgcccccccgtttcaccaggcacaaccgggaacgccgcgccaaattgtgcgcgaacttcgtctactgttcgacaaggtggcaatccactcaagttggcactggtagaaaccagcggtttaccataagcctggcacaaagcaaccaccaacggatggtcggtgactcgtacagcaaggctatcaaagcggcccgtcaaccagcgcggtgttgtcgcaggcgcgggaaagacaaaggtgacaggacctggccagcgggaaaaaatggtttcacgctgcacgtcagtcaacatggtgtcatcaatatagggtttaagctgctcgtaatttgctgcgattaaaatcagccccttatcaaccggacgctgttttaactccaacagtcgcatcactgctgtttcgctatcaggatcgcacccaacaccgaaaacggcttccgttggataggcgatgacacgttcttcattgagaacatctatcgcagctgcgatagcgtctctttgcaggttattattcacgttattattccgcgctaaccggctttccacattgtttactggcacaaaagtgttttacaccctgcgcggttttcttttcgatgagtagcggataatgacactcagggcattctccagctatgggtttgaagttaatggcaaattgacactccgggtagcgatcacaagagtgaaatgttttgccataacgggagcggcgctggaccagatggcccgtccgacattgggggcatgtaattgctgtttcgtccggtttatcgataagttcggtatgttcgcattcagggtagttaatgcaaccaataaacataccaaagcgtccctggcgtaataccagatttgcgccacatgcagggcaaacctgcccctccagaactttgacgatatgtccatccgcactagatttcagaggacggacgtagtcacacgccggatactgactgcatccaagaaacggaccgtgtttcccggatcgaataaccagttcagccccgcactttgggcaggactcattattacgcaccgtgaacagtgcacttttcgccataacaacttatgctgaattaaagaaatgattaatgcagcataccttcattcacttcaaagagtaattcttccatttgctggtacgcattttcgcagcccggaatattgaacaacaccatcaggatcacccatttcagatcatccagttcgaactctgcgttatccagcgcgagcactcgctctatcaccatttcacgagtttcaaggttgagcacctgaatctgctcaaggaaaagcagaaacccacggcagctggcatccagtcgttcacactcttccggtgtataaatacgcatggagagaggatcgctggccagttgcatcggttctgccaacccttcctgataatcagcaagtttttccagccatagcagggcattgtagatatcttctcgctcaaaacctgcgtcggtaagatcctgttcaagtttgtcttgatccacacgcaactcagcttctgtgtgaatataggtttcaaacaaatacattagtacgtcgaacatggcatgccctcctcaatcggacatagccgccgggtacagctgcgatccatcctgctaactccagttcgagtagttgagtaactacctctggcacaggttggccggcacgttcagcgacgacgtcaacaggtgttacctcatctcctacgttagccaggagctcaggaaatggcaatgccacgtcttgctgatctggactataaaaactattttcaggggcgtctggcaaccagtgcaatccaaattgcaagttttccagaatttcttccggttccgtcacaagaatcgcaccttgttttattaaccagtgaggcccttcgcttcccggattccctattggacctggcaaggcaaaaacttctcgcccctgctcaagcgcacaacgtgctgtcaccaggctaccactacgcaaagccgcttccaccaccagtacacctttacttagaccactgataatgcgatttcttcgtgggaaattgtaagcaaggggtggaacatcgaggggaaattcgctgacgagagcgcccccctgttcaagcagactggcagccagtcgggcatgacggcggggatgaatggtattaagtccattccccaatacagcaatgctgacgccatttacctgtaaggctgctttatgcgctacaccatcgattccacgcgccagtccactcgtaattgtcactccacgcgtcgccagagtttcgcaaaataatcgtccccatcgctcgccataccaactatgcgcccgactccccactacggcaagctgaaaactatgcagcgcgtgcagttctccttcaacaaacagtgcgccggggtaatctgtcgtcgccagaagttgaggaggataaaattcgctgtccgcaggaattaaatgatggttgggttgctccaaccaacaaagactgctttcgatactctttcgtggaaaactaagaaagcgttgtgcctgccgcaatgtaagccctgtttgctgcaatacaaccgcatcaatatggctctgttttgccacccagtgagcgatacggaccatatcatcgccgtacaagctgctgatactcattaaacgcagccaaatttctgtatcgaccatccttatctccctgccataagcagccttagcaatctttgcgattggtcagtgatgctgtcaatcagagggggatttgtctagaatagaagaaataatctttctaactcctgaacacatctctggagatttatgagtgttttgcaagtgttacatattccggacgagcggcttcgcaaagttgctaaaccggtagaagaagtgaatgcagaaattcagcgtatcgtcgatgatatgttcgagacgatgtacgcagaagaaggtattggcctggcggcaacccaggttgatatccatcaacgtatcattgttattgatgttagcgaaaaccgtgacgaacggctagtgttaatcaatccagagcttttagaaaaaagcggcgaaacaggcattgaagaaggttgcctgagcatccctgaacaacgtgctttagtgccgcgcgcagagaaagttaaaattcgcgcccttgaccgcgacggtaaaccatttgaactggaagcagacggtctgttagccatctgtattcagcatgagatggatcacctggtcggcaaactgtttatggattatctgagtccgctgaaacaacaacgtattcgtcagaaagttgaaaaactggatcgtctgaaagcccgggcttaaggataagaactaacgtgagtgaaagtctacgtattatttttgcgggtacacctgactttgcagcgcgtcatctcgacgcgctgttgtcttctggtcataacgtcgttggcgtgttcacccagccagaccgaccggcaggacgcggtaaaaaactgatgcccagcccggttaaagttctggctgaggaaaaaggtctgcccgtttttcaacctgtttccctgcgtccacaagaaaaccagcaactggtcgccgaactgcaggctgatgttatggtcgtcgtcgcctatggtttaattctgccgaaagcagtgctggagatgccgcgtcttggctgtatcaacgttcatggtagtctgctgccacgctggcgcggtgctgcaccaatccaacgcagtctatgggcgggtgatgcagaaactggtgtgaccattatgcaaatggatgtcggtttagacaccggtgatatgctctataagctctcctgcccgattactgcagaagataccagtggtacgctgtacgacaagctggcagagcttggcccacaagggcttatcaccacgttgaaacaactggcagacggcacggcgaaaccagaagttcaggacgaaactcttgtcacttacgccgagaagttgagtaaagaagaagcgcgtattgactggagtcttagcgcagcacagcttgaacgctgcattcgcgctttcaatccatggccaatgagctggctggaaattgaaggacagccggttaaagtctggaaagcaagcgtcattgatacggcaaccaacgctgcaccaggaacgatccttgaagccaacaaacaaggcattcaggttgcgactggtgatggcatcctgaacctgctcagcttacaacctgcgggtaagaaagcgatgagcgcgcaagacctcctgaactctcgtcgggaatggtttgttccgggcaaccgtctggtctgatagtccactcttctaagcccggtcttgccgggcgtttttatacttatgaaaaaacaacgtaatttacgtagcatggcggcccaggccgttgaacaagtcgtcgagcaagggcaaagtttaagcaacattctgccaccgctccagcaaaaagtttccgataaagacaaagcacttcttcaagagttgtgctttggcgtactgcgtacgcttagccagttagactggctgattaataagttaatggcccgtccgatgaccggcaaacagcggaccgtgcattacctgattatggttggtttgtatcaactgctttatacccgcattccacctcatgctgcgctggctgaaacggttgaaggcgctatcgcaattaagcgtccgcaacttaaagggttgataaacggtgtattacgccagttccagcgtcagcaagaagagttattagccgagtttaatgccagtgatgcacgttatctgcatccttcctggttgctgaagcgtctgcaaaaagcgtatccagagcagtggcaatccatcgtcgaagccaataaccagcgtccgccaatgtggctgcgtattaatcgtacgcatcattcccgcgacagctggcttgcattgctggatgaagcaggaatgaaaggtttcccgcatgcggattaccctgatgctgtacgtctggaaacacctgcacctgttcatgcgctacctggttttgaagacggatgggttaccgttcaggatgcaagtgcacaaggttgcatgacctggcttgcgccacaaaacggtgaacacattttggatctttgtgccgcccccggcggtaaaacaacgcatatccttgaggtggcaccagaagcgcaggttgttgcggttgatatcgacgaacagcgcctctctcgggtttacgacaatttaaaacgccttggtatgaaggcgaccgtgaaacaaggtgatggccgttacccttctcaatggtgtggcgagcaacagtttgatcgcattttattagatgcgccttgtagtgcaaccggtgtgattcgtcgccatccagatattaaatggttacgtcgcgatcgcgatatcccggaactcgcgcaattgcagtctgaaattctcgacgccatttggccgcatttaaaaaccggtggaactctggtctatgccacctgtagcgtgttaccggaagagaatagcctgcagattaaagcctttttgcaacgtaccgctgatgccgaactttgcgaaacaggaacaccagagcaaccgggtaaacaaaatctacctggtgccgaagagggcgacggcttcttttacgctaagctaatcaaaaagtgatgagataacgggtcgcgactgatgaaaattatcattctgggtgccggccaggttggcggcacactggcggaaaacctggttggcgagaacaacgatattactgttgtcgataccaacggtgagcgtctgcggaccttacaggataaatttgacctgcgggtcgtgcaggggcatggctctcatccacgcgtattgcgggaggcaggtgccgacgacgccgatatgctggttgctgtaaccagtagtgatgaaaccaatatggttgcctgccaggtagcctacagtcttttcaacacccctaatcgcatcgctcgtatccgcagtccagactacgtgcgcgatgccgataagctatttcatagtgatgctgtgccgattgatcatctgatcgcaccagagcagttggttatcgataatatttaccgactgattgagtatcccggcgcattgcaggtggtgaacttcgctgagggtaaagtcagcctggctgtggttaaagcctattatggcggcccgctgattggtaatgcacttagcaccatgcgcgaacatatgccacatatcgatactcgtgtggcagcaattttccgccacgatcgccccattcgtccgcaaggtagcaccattgttgaagctggtgatgaagtgttctttattgccgctagtcagcatatccgcgcggtgatgagtgaattacagcgactggaaaaaccgtataagcggatcatgctggttggtggcggtaatatcggtgcagggctggcgcgtcgtctggaaaaagattacagcgttaaactcatcgaacgtaatcagcagcgcgctgccgaactggcggaaaagttacagaatacgatcgtcttttttggtgatgcgagcgatcaagaactactggccgaagaacatatcgatcaagttgatctgtttattgccgtcaccaacgatgacgaggccaatatcatgtccgccatgcttgccaaacgtatgggtgcgaaaaaggtgatggtattgatccagcgtcgcgcttatgtggatctggttcaggggagcgttatcgatattgcgattagtccacaacaagcaactatttctgcgttgcttagccatgtgcgaaaagcagatattgttggtgtttccagtttgcgccgcggcgtagcagaagctattgaagccgttgctcacggtgatgaaagcaccagtcgcgttgtcggcagagtcattgacgaaatcaagctaccgccaggaacgattattggagcggtggtacgtggaaacgacgtgatgattgccaatgacaatctgcgcattgagcaaggcgatcacgtaattatgttcctcacagataaaaagtttattaccgacgtcgaaagactcttccagccaagccctttcttcttgtaattaataaggcgtctaatgacgccttattatttccctttgattatcaaggattaattaaattcattcctggcaggaaaatggcttaacatttgttagacttatggttgtcggcttcatagggagaataacatgagcattattaaagaatttcgcgaatttgcgatgcgcgggaacgtggtggatttggcggtgggtgtcattatcggtgcggcattcgggaagattgtctctagtctggttgccgatatcatcatgcctcctctgggcttattaattggcgggatcgattttaaacagtttgctgtcacgctacgcgatgcgcagggggatatccctgctgttgtgatgcattacggtgtcttcattcaaaacgtctttgattttctgattgtggcctttgccatctttatggcgattaagctaatcaacaaactgaatcggaaaaaagaagaaccagcagccgcacctgcaccaactaaagaagaagtattactgacagaaattcgtgatttgctgaaagagcagaataaccgctcttaacaagcgccactaagcagaagaccagtggtaaaaaagtgatttactttcttgccactggcctcccagttcccccgattgccatgttttccttttcgcatgtaactgcctttccccttcttatttttctctacgcgctgtcggaataagggatcatgtagtaatgcttctatcgcattatcctttatctgccctttagtatgctgatatcgactcataaaaactccagttggttatttaacggcgcgagtgtaatcctgccagtgcaaaaaatcaacaaccactcttaacgccactcgccccttgttcaagagcttcaagaatgctacaataaacactgctatgagcagtcccacaacaggcatcgttaaggcgttgcaaggaacgctgcatactctgcaactcggctatccgtgcttcgacttcctgcaatctttcctgcacaatgcctttactctcctgacaggtatggtgttcaggatcgatgcggatgctcagcaactcgcggatgctctccagactgaaacctagttgtctggcatggcggataaatttcaatcgctggagatcgctttcggtatataggcgaaacccaccttcagtacgcacttcatgctccatcatctgctgtttttcgtaataacgaatcgtgtcgggtgttacttccgccatttttgccagctcaccaatgcgatacatacatactccattagttatcgttgattttgtccaacaacttgtcagcataatcgccgcgtaaaaaatcggtactcaatccagcttgtcgcagcttcaattccagtaaactcaatcgacggctaacctcttgatattgcggatcatcgtgacggatacctttgagaatatccagaagctgaattgcttctctccgttgctcaagttctggcggtaagcaaccggcattcttcagcaagcgataccccgcacgtaattccggtggcacgtgagaatcatcatccagtatcaatggttcgccgctacctgccaggttatcaaactcacctttcgcttgcgcttctgctatatggcgctctgcccactggtcaagtaaccacataaatactccaggggatgaacaaaaagagtacagctattgtagataagtggggatactacgggtataaaaaaacccgccggggcgggtttttttacgttgcttcagattactctgcagcagcttctgctttctcactacgatcaaccagctcgatgtaagccatcggcgcgttgtcgcctgcacggaagccacacttcagaatacgagtgtaaccaccggcacggctcgcgaaacgcgggcccagttcgttaaacagttttgccacgatctcgttatcacgagtacgggtgaatgccagacgacgattagcaacgctatcagtcttggcaagagtaatcagcggctcaactacgcggcgcagctctttcgctttaggcagagtcgtcttgatgatttcatgacgaaccagactacctgccatattgcggaacatagcctggcgatggctgctgttgcggttcagttgacgaccactcttacgatggcgcatgaccttatccttctcagtaaaaccttaacctgtgattcggttactcgtcagcgatgcttgccggtggccagttttccaggcgcatgcccagagacagtccacgggaagccagcacgtctttaatctcagtaagagattttttaccaaggttaggcgttttaaggagctcaacctcggtacgctgtaccagatcaccgatatagtggatagcttctgctttaaggcagttagcagagcggacagtcaattccagatcgtcaacagggcgcagcaggatcggatcgaactctggtttctcttctttcacttcaggctgacgtacatcacgtaagtcaacgaaagcttccagttgttcagccagaatggttgccgcacgacgaatcgcctcttcaggatcgattgtgccgttggtttccatttcgatgaccagcttgtccaggtcggtacgctgttctacacgcgctgcttcaacattgtaggcaatacgctccacagggctgtagcatgcgtcgaccagcagacggccgattgggcgctcatcttcttcgctatgaattcgggtagaagccggcacataaccacgaccgcgctgaactttgatacgcatgctaatagacgcgttctcatcggtcaggtggcagatcacgtgctgcggcttgacgatttcgacatcaccgtcgtgggtgatatcggctgcagtcacagggccaatgccagatttattcaaggtaagaataacttcatctttgccctgaactctcaccgccagccctttcaggttgagcaggatttccaggatatcttcctgaacgccttctttggtgctgtactcatgtagtacaccatcaatctcaacctcggtcaccgcgcaacccggcatgctactgagcagaatacggcgcagtgcgttacccagagtatggccaaagccacgctctaaaggctcaagggtcaccttggcgtgcgtgctactcacttgctcgatatcaaccaggcgcggttttagaaactctgtcacagaaccctgcattgtgtcctctctttggtactaagctttacttggagtaaagctcgacgatcaggtgttcgttaatgtccgcagacagatcagaacgctccggcttacgcttaaacgtaccttccatcttgccagcatcaacttccagccaggttggcttttcacgctgctcagccagctccagagcggctttcacgcgagactgcttcttcgctttctcacgaatgcttacaacgtcattcggactaacctgataagaagcgatgttaacaacacgaccgtttaccataattgctttatggctaaccagctgacgtgcttctgcacgagtggcaccgaagcccatacggtatacaacgttgtccagacgaccttccagcagagccaacaggttttcaccggtgttgcctttcagacgtgctgcttctttgtagtagttacggaactgacgctccagcacaccatagatacggcgaactttttgcttttcacgcaactgcacaccatagtcagacagacgcggtttacgcgcaccgtgctggccaggagcttgttcaattttacacttggtatcgatcgcgcgaacgccagacttaaggaataagtcggtgccctcacgacggctcagcttgagcttaggacccaaatatcttgccattttctttctccaacaaacctggaaaacgaggcgttatacgcgacgttttttcggcggacgacaaccgttatgagggatcggagtcacatcagtaatgttagtgatgcggaaacctgcggcgttcagagcacgaatagtagattcgcggcctggacccggacctttaaccataacttccagattcttgatgccgtattctttcacggcgtcagcgcaacgctctgctgcaacctgagctgcaaacggagtggatttgcgagaaccacggaaaccggaaccaccggctgttgcccaacccaacgcgttaccctgacgatcagtgatagtcacgatggtgttgttgaaagaagcatggatatgagccacgccgtcagagacttgttttcttacacgtttacgtgcacgaattggtgcctttgccattattcaatcaccccgattatttcttgatcggtttgcgcggacccttacgggtacgtgcgttggtcttggtacgctgaccgcgaaccgggagaccacgacgatgacgcaaaccgcgatagcaaccaagatccatcaggcgcttgatgctcatgctgatttcacggcgcagatcaccttcaacgacaaatttggcaacttcgtcacgcagcgtgtcgatttgtccttcagacagctcactgatcttaacatcttcagcgatacccgctgcagccaggatggctttagaacgggtcttgccgacgccataaatgctagttaatgcgattacggcatgcttatgatcaggaatgttaatgcctgctatacgggccactatgcactcctactatttaatatgtacgttccatgctgaaaagcccgttttcaggatactcaaatggaaacgcacagacatacaaaagattggctggctaatctagccagctcaacccaactttgcaagaaaaatatgcgaaaaaatcagccttggcgctgtttatgcttcggctcggcactgcaaatcacacggatgacaccatcacgcttaacgattttgcagttacggcataatttcttgacggaagcacgaactttcatttttactctccgtaacttctcgggcgaccaattatcggccgtagcctttcaggttcgccttcttcaatgcagactcatactgactggacatcatcagagtttgcacttgagccataaagtccataatcacgacaacaacgataagcagactggtcccaccgaagtagaacggtactttcattgcatcacgcatgaactccgggatcaggcagataaaggtaatatacagcgcaccaaccagggtcaggcgggtcattactttatcgatatacttcgccgtttgctctcccggacgaattcctggtacaaatgcaccggacttcttcaggttatctgctgtttcacgcgggttgaaaaccaacgccgtgtagaagaaacagaagaagatgattgcagacgcatagagtaacacataaagcggttgcccaggctgcaaatacaggctaattgttgtcagccagttccaaccagtaccgcccccgaaccaactcgcgatggtcgccgggaacagaataatactggaagcgaagattgccgggattacccccgccatattcactttcagcggtaaatgtgtgctctgtgcagcatagacacgacgaccttgctgacgtttcgcgtagtttaccacaatgcggcgttgaccacgctcaacaaatacaacaaagaacgtcactgcaaatactaatactgcaaccaacagcaacacgaggaagtgcaggtcgccttgacgcgcttgctcgatagtatgggcaatggctggcgggagtcccgcgacaataccggcgaagataatgatactaataccgttgccgatacctcgttcagtaatctgttcgcccaaccacatcaggaacatggttcctgtgaccagacttacaacagcggtgaagtagaatgcaaagcccgggttaatcaccaggccttgcataccaggcatattcggcagaccggtagcaataccgatgctctggaatattgccagcaccagagtaccgtagcgggtgtactggctgatcttacgacgaccagactccccttctttcttaatttctgccaacgttgggtgaaccaccgtcagcagctggataatgatgctcgcgctaatatacggcatgatccccagagcaaagatagaagcacggctgagagcaccaccagagaacatgttaaacatctcaatgatggtgcctcgctgttgctcaagcagtttggcaagtacagcggcatcaataccagggatcggaataaaagagccaatacggaacacaatcagcgcaccgataacaaacagcagtctgcgtttcagctcgcctaagccacctttggcactttgaaaatctaatcccggttgtttagccatctgctacttattcctcgattttaccgccagcagcttcgatagcagcacgagcgcctttagtaacacgcaggccacgaacagttaccggagtcgttacttcgccagccaggatcactttcgcgaactcgatctggataccgataatgttagccgctttcagcgtgttcaggtctactacaccgccttctactttagccaggtcagacagacgaatttcggctgtaatcgctgctttacgagaagtgaagccgaatttcggcagacgacggtacagaggcatctgaccaccctcgaaaccgcgacgtacgccaccgccagaacgagacttctgacctttgtgaccacgaccaccggttttaccgaggccagaaccgataccacgacccaggcgtttacccgcctttttggagccttcggccggagacagagtatttaaacgcatctcttactcctcaactttaaccatgaaggaaaccgcgttgatcataccgcgaatagcaggagtatcctcgcgctctacggtgtgaccaatacgacgcagacccaggccaagcagcgttgccttgtgtttcggcagacgaccgattgcactgcgggtttgagtaattttaatagtctttgccatggtttatttccccagaatttcttcaacggatttaccacgcttggcagcgaccatttctggagaattcatattttccaggccatcaatagttgcacgaaccacgttgatcgggttggtggaaccataggctttagccagaacgttatgaaccccagcgacttccagaacggcgcgcattgcaccaccggcgatgataccggtaccttcggaagccggctgcatgaatacgcgagaacccgtgtgaacacctttaacagggtgttgcagagtgccgttattcagcgcgacgttaatcatattgcgacgggctttttccatcgctttctggatcgctgctggaacttcacgcgctttaccgtaaccaaaaccaacgcgaccgttaccatcgccaactacagtcagagctgtgaaggagaaaatacgaccacctttaacggttttagatacgcggtttaccgcgatcagcttttcctgcagttcgccagcttgtttttcgatgtgagccatcttacacctctaccttagaactgaaggccagcttcacgggcagcatctgccagtgcctggacacgaccatgatattggaacccggaacggtcaaaggatacatctttgatgcctttttccagagcgcgttcagcgacagctttacccacagctgcagccgcgtctttgttaccggtgtacttcagttgttcagcgatagctttttctacagtagaagcagctaccagaacttcagaaccgttcggtgcaattacctgtgcgtaaatgtgacgcggggtacgatgtaccaccaggcgagttgcgcccagctcctggagcttgcggcgtgcgcgggtcgcacgacggatacgagcagatttcttatccatagtgttaccttacttcttcttagcctctttggtacgcacgacttcgtcggcgtaacgaacacccttgcctttataaggctcaggacgacggtaggcgcgcagatccgctgcaacctggccgatcacctgcttatcagcgcctttcagcacgatttcagtctgagtcggacattcagcagtgatacccgcaggcagctgatggtcaacaggatgagagaaacccagagacaggttaatcacattgcctttaaccgctgcacggtaacctacaccaaccagctgcagcttcttagtgaagccttcggtaacaccgataaccatactgttcagcagggcacgcgcggtaccagcctgtgcccaaccgtctgcgtaaccatcacgcggaccgaaggtcagggtattatctgcatgtttaacttcaacagcatcgttgagagtacgagtcagctcgccgtttttacctttgatcgtaataacctgaccgttgatttttacgtcaacgccggcaggaacaacgaccggtgctttagcaacacgagacattttttcctccgattaggctacgtagcagataatttcgccaccaagaccagcctggcgcgctgcacgatcagtcataacacctttagaggtagaaacaactgcgatacccagacccgccataactttcggcagctcatctttacgtttatagatgcgcagacctgggcggctgacacgctgaatgctttctacaacagctttgccctggaaatacttcagagtaagttccagttcaggcttggtgtcgccttcaactttaaaatcttcaataaaaccttcttccttcagcacgttggcgattgccactttcagcttggaggaaggcatggtgaccgcagctttgttcgcggcctgaccgttacggatacgggtcagcatatccgcgatcggatcttgcatgctcatctgtctttactcccgtgattcaattggtgacaattaccagctagcctttttcagacccgggatttcaccgcgcatagcggcttcacggaccttaatacggctcaacccgaacttccgcaggaaaccatgcggacgacctgtttgacggcagcggttacgctgacgagacgggctggaatcacgcggcagagtctgcagcttgagaacagcgttccaacgatcttcgtcggaagcgttcacatcagagatgatcgctttcagttcagcgcgtttcgcgaagtatttatcagctaaagctacgcgttttacttcgcgtgctttcatactttgcttagccatttagtaaccctaccttacttgcggaacgggaagtcaaaggcagccagcagagcgcggccttcttcgtcagatttcgcagtagtggtaatggtaatatccaaaccacgaacgcggtcgactttatcgtagtcgatttctgggaagatgatctgctcacggacacccatgctgtagttaccacgaccgtcgaaagacttagcggacaggccacggaagtcacggatacgaggtacagcaatagtgatcaggcgctcaaagaactcccacatgcgttcgccacgcagagttactttacagccgatcggatagccctgacggattttgaagcctgcaacagatttgcgtgctttggtgatcagcggtttttgaccggagattgctgccaggtctgctgctgcgttatccagcagttttttgtcagcgatcgcttcaccaacacccatgttcagggtgatcttctcgacccgagggacttgcatgacagaattgtagttaaactcagtcatgagttttttaactacttcgtctttgtagtaatcatgcagtttcgccatcgtactactccaaattacttgatagtttcgctgttagacttgaagaaacggacttttttaccgtcttcgaatctaaagcctacacggtcagccttgccggttgccgcattgaagattgctacgttggaaacctgaatagcggcttctttttcaacgatgccacccggttggttcagggccggaaccggcttctgatgtttcttaaccaggttgataccttcaacaatgaccttgccggaagacaggacattcttaactttaccgcgtttacctttatctttaccggttaacacgataacttcgtcatcacgacggattttcgctgccatgattcgctccttagagtacttctggtgccagagagataattttcatgaacttctcactacgaagctcacgagttaccggcccaaaaatacgcgtaccgataggctgctcgctgttgttgttcagaagaacacaagcattaccatcgaagcgaatgacagaaccgtccgggcgacgaacacccttcttggtgcgcaccactaccgccttcagcacatcaccttttttgaccttaccacgcggaattgcttctttgatggtgatcttgatgatgtcgcctacgcctgcgtagcgacggtggctgccacccagaaccttgatacacattacgcgacgtgcaccggagttgtcggcgacgttcagcatagtctgttcttggatcattttagtgctccgctaatgtcaactactactgagacccgaaaatcaggtcgttaaaaatccccatatcgagggcgcggcattataacaccgcttcaaggatatgggtagaaaaaataaacggctcatttctgagccgtttattcgtattgagagagtgtactgtattacagaaccgctttctctacaacgcgaaccagcgtccaggatttagtcttggacagcggacggcattcgcggatttcaaccacgtcaccgataccgcattcgttgttctcgtcatgtacgtgcagtttggtcgtacgcttgatgaatttaccgtagatcgggtgtttcacaaaacgttcgatagcaacaacaatggatttctccattttgtcgctaacaacgcgaccttgcagagtacggattttatcggtcattacgcacccgccttctcgttcagtaaagtcttaacgcgtgcgacatcgcgacgcacttgcttcaacaggtgagactgttgcagctggccacttgcagcctgcatacgcaggttgaactgctcacgcagcaggttcagcagctcggtgttcagctcttcaacgctcttctcacgcagctcttttgctttcattacatcaccgtcttagttacaaaggtggttttaatcggcagtttcgctgctgccagcttgaatgcttcacgggccagctcttccggaacaccgtccatttcatacaggactttacccggctgaatcaaggcaacccaatactccacgttacctttacctttacccatacgcactgccagcggcttttcagtgatcggtttgtccgggaacacacggatccagatcttaccttgacgcttaactgcacgggtcatagcacgacgtgctgcttcgatctgacgggcagtcagacgaccacggccaacagctttcagaccgaagctgccgaagctaacatccgtaccctgcgccagaccgcggttacggcctttgtgcattttacggaattttgtacgctttggttgtaacatcagcgacgctccttatttacggcctttacgctgctgctttttaggctgagcagccggtttttccggttgttcaacagcagccataccacccaggatctcgcctttgaagatccacactttaacgccgattacaccgtaagtggtgtgcgcttcagaggtgttgtagtcgatgtcagcacgcagagtgtgcagcggtacgcgaccttcgcggtaccattcggtacgtgcgatttccgcgccgcccagacggccgctaacttcaactttaatacctttagcgcccagacgcattgcgttctgtacagcacgcttcatagcacgacggaacataacgcgacgttccagctgagaagtgatgctgtcagcaaccagttttgcgtccagttcaggcttacgaacttcggcgatgttgatctgtgcaggaacgccagcgatgtccgctacgaccttacgcagtttttctacgtcttcaccttttttaccgataacgatacccgggcgagcagtgtgaatggttacacggatgctcttagccggacgctcgataacgatacgagatacggacgctttagccagttccttagtcaggtactgacgtactttaaaatcgctgtccaggttgtcagcgaattctttggtgttcgcaaaccaggtagagttccatggttttacaatacccaggcgaataccattaggatgtactttctgacccattgctagtctccagagtctcagcgatcggacacaaccacagtgatgtggctggtgcgcttcaggatgcgatctgcacgaccttttgcacgcggcataatgcgcttcatgctcgggccttcgtctacgaaaattttcgtaactttcagatcgtcaatgtcagcgccatcgttgtgttcagcgttagcaatggcagattccagaactttcttgaccagtacagccgctttcttgttggtgtaggtcaaaatatccagagcctggctcactttcttaccgcgaatcaggtcagcaacaaggcgaaccttctgagcagaagaacgagcatggcgatgtttagcgatagtttccatctcttcctcctaccttatttcttcttcgcttttttatcagcagcgtggccgcgataagtacgagtcggtgcgaattcacccagtttgtgaccaaccatttcgtcggttacaaataccggaacgtgctgacgaccattatggacagcgatggtcaaaccgatcatgttaggaaagatcgtactacgacgggaccaagtgcgcaggggcttcttgtctccgctttccaccgctttctctaccttcttcagcaagtgcaggtcaataaaaggacctttcttgagagaacgtggcatggcttatcctctaaaattatttgctacggcgacgtacgatgaatttatcagtacgcttgttgctgcgggtcttcttacctttggtctgaacgccccacggagttaccgggtgcttaccaaagttacgaccttcaccaccaccatgtgggtggtctaccgggttcatcgcggtaccgcgaacggtcggacgaacaccacgccagcgtgcagcacctgctttacccagaacgcgcagcatatgctcagcattgccaacttcgcccagagttgcacggcagtctgcttctactttacgcatttcaccagaacgcagacgcagggtgacataagcaccatcacgagcaacgatctgaacgtaagtaccagcggaacgtgccagctgaccgcctttacctggtttcatttctacgttatgaacagtagaaccaaccgggatgttgcgcatcggcagggtgttacctggtttgattgcagcatcaacgccagactgaatctggtcgccagctttcaggcctttaggggccaggatgtaacggcgttcaccgtctttgtacagaaccagcgcgatgttcgcggaacggttcggatcgtactcaagacgttcaacaactgccgggataccgtctttgttgcgtttgaagtcaacaatacggtaagcctgcttgtggccaccaccgatatgacgagtggtgatacggccattgttgttacgaccaccggatttgctgtttttttccagcaacggagcaaaaggtttgcccttgtgcagctcagggttaaccactttaactacgtggcgacgacccggagatgtcggtttacatttaacaactgccattgtattactcctccgacttactcagcgccgccaacgaagtccagattctggccttctttcagggtgacgtaagcttttttccagtcgctacgacgaccgatacgctgtccgtgacgtttaactttccctttaactaccagggtgttaacgacttcgacttcgacttcaaacagtttctgcacagcagctttgatttctgctttggtcgcgtctttagcaactttgagtacgatggtgttggatttttccatcgcagtagacgctttttcagaaacgtgcggtgcacgcagcaccttcagcagacgttcttcacgaatcatgccagcatctcctcaacttgcttaacagcatcagcagtcattacgactttgtcgaaggcgatcaggctaaccgggtcgataccagttgcatcgcgtacgtcaaccttgtgcaggttgcgcgcagccaggaacaggttttcgtccagctcaccggtgatgatcagcacatcttccagagccatgtctttcagtttctgtgccagcagcttagttttcggcgcttctacagagaacttctcgacaacgatcagacgatcctgacgtaccagttcggacaggatgcttttcagcgcgccgcggtacatcttcttgttaactttttgactgtggtcctgcggacgagcagcaaaggtcacgccaccagaacgccagatcgggctcttgatagaaccagaacgcgcacggccggtgcctttctggcgccacggttttttaccggaaccagttacttcagcacgagtcttctgagcacgagtaccctgacgagcaccagctgcataagcaacaacaacctggtgaaccagcgcttcgttgaaatcacgaccgaaggtagtttcggaaacagtcagcgcgctctgcgcgtctttcaatactaattccattgctatctccttacgccttcacagctggtttaacgatcaggtcgctaccggttgcacccgggacagcacctttaaccagcagcaggttgcgctcagcgtcaacgcgtactacgtcaaggctctgaacggttacacgttcgttacccatctgacctgccattttcttgcctttgaacactttgcccggagtctggttctgaccgatagaacccggaacgcggtgagacaaggagttaccgtgagtagcgtcctgggtacggaagttccagcgcttaacggtacctgcgaaacctttacctttagaggtgccagttacgtcaacttttttaacgtcagcaaacagttcaacgctaatgctctgacctacagtgaactcttcgccttcagccaggcggaattcccacagaccacggccagcttctacgccagctttagcgaagtggccagcttcaggcttggtcacacggttagcttttttagcaccggtggtcacctgaatagcacggtagccatcgttagccaggtctttaacctgagtaacgcggtttgcttcaacttcgattacggttactgggatagaaacgccgtcttctgtgaagatacgggtcatacccacttttttaccgactaaaccaatcattgtttcaacctctcaatcgctcaatgacctgattaacccaggctgatctgcacgtctacaccggcagccagatccagacgcatcagagcatcaacggttttctcggttggctcaacgatgtcaaccagacgcaagtgagtacggatttcgtactgatcgcgcgcgtctttgttgacgtgcggggagatcagaacagtgaagcgctctttgcgtgtcggcagcgggatcggaccacggacctgcgcaccagtgcgcttggcagtctcgacgatttccgcggttgcttgatcgatcagacgatgatcaaacgctttcaggcggatacggattctttggttctgcatgagaccagagctccaattattttataaacgaaaatgattactcctcagacccattacgattgatgggagagtgtaaccgttcttacgtagctccccgattgggagcattgttaggtagccaaattcggctaactgaggttcagattgaacctgctgtcaactacgacaagcccgcgcattatacatacttaaccaccgaacgcaagcgtattgctagtaaagtaaacagccttcgggttatctctcaagttcgttcagtgcatttttgacacgctctcttaaaccggctttctcttcgctttcttccacagtattttcttcgtcttcagaagaagagggggcattctcaaccgcgacgcctgggtcatcttcctcctcgacggattcgacgacggggagtggctgttttttgaagaaatagtgttgtgtactttgtttaaaagcgggcgtttcagcctctacagtgacttcggcttttactatccaaagcacccatagctgcctggcatacccaccaaccagcaccattcctgcaaaccacaggcaaatcagtaataaacaaattacatatattatggtgctgtgtttttgtcgggagaagataccagggtgacctgtttctttctgctcacgcgcggcgatatagaattcaaacattataatcccttgtgacgtaaaaactgcaaaacaaaagtcctacgcaggaattatttacgttttacgagaacccttcaatatgaattaaattacggcattaaaaataagaaaaaagcctgacaaatgaagcattttaaaaacagaaacattcatatttaaaatgttaaattgaattgatattttaaatatgaataatttattcgttctgacagtacgaataagatatgccgtcaacaaatgcaaaaagggcgccgaagcgcccttttcaattcaaaactaattaacgtgtaattagcccagaactttagcaacaacgcccgcgccaacggtacggccgccttcacggattgcgaaacgcagaccgtcgtccatcgcgatcgggtggatcagggtaacaaccattttgatgttgtcgcccggcattaccatctctacgccttccggcagttcgatggtaccagtcacgtcagtagtacggaagtagaactgcggacggtagcctttgaagaacggagtatgacggccgccttcatctttggacagaatgtacacttcagattcgaacttggtgtgcggcttgatggtgcccggcttagccagtacctgaccacgttcgatttcttcacgtttgataccacgcagcagaacacctacgttctcaccagcacggccttcgtccagcagtttgcggaacatttcaacgccagtacaggtagacttctgagtctctttgataccaacgatttcaacttcttcaccaactttgatgataccgcgttctacacgaccggtaacaacggtaccacgaccggagatggagaatacgtcttcgatcggcagcaggaacggcttgtcaatcgcacgctctggttccggaatataagaatccaggaagccagccagttccaggattttcgcttcccactctgcgtcgccttccagcgctttcagagcagaaccacgaacgatcggagtgtcgtcgcccgggaagtcgtactgagacagaagttcacgaacttccatttcaaccagttccagcagctcttcgtcatcaaccatgtcgcatttgttcaggaacacgatgatgtacggaacgcctacctgacgacccagcaggatgtgctcacgagtctgcggcatcgggccgtcagtcgcagcaactaccaggatcgcgccgtccatctgagcagcaccggtgatcatgtttttaacatagtcggcgtgccccgggcagtctacgtgtgcgtagtgacgggtcggggtgtcgtattcaacgtgagaagtgttgatggtgataccacgagctttttcttccggcgcgttatcgatctggtcgaatgcacgagcagcaccgccgtaggttttagccagtacggtggtgattgcagcggtcagagtagttttaccgtggtcaacgtggccgatagtaccaacgttaacgtgcggttttgtacgttcaaatttttctttagacacggctatattccttactatagtgctctccccttcaggagagagcacgggactttggtattaacccttaggcttatttaccacgggcttcaattacggcctgagcaacgttactcggcgcttcatcatacttcaggaattccatagtgtaacttgcacgacctttggtcagagaacgcagctgagttgcgtatccgaacatttcagacagcggtacttcagcgtggatcttaacgccagtaacttcagattcctgacctttgagcataccacgacgacggctcaagtcaccgataacgtcaccggtgttctcttccggagtttctacttcaaccttcatgatcggctcaagcagaactggtttcgctttcttaaagccttctttaaaggcgatagaagcagccagtttaaacgccagttcagaggagtcaacgtcatggtaagaaccgaagtgcagacgaatacccatgtctactaccgggtagcctgccagcggacctgctttcagctgttcctggatacctttatcaacggccgggatgtattcgccagggattacaccacctttaatgtcgttgatgaactcgtagcctttcgggttactacccggctccagcgggtacatgtcgataacaacatgaccatactgaccacgaccaccagactgtttcgcgtgtttaccttcaacatcggtaactttctggcggatagtttcacggtaagcaacctgcggtttacctacgttcgcttcaacgttgaattcacgcttcatacggtcaacgatgatgtcgaggtgcagttcgcccatacccgcgatgatggtctggttagattcttcgtcagtccatacacggaaagacgggtcttctttagccagacggcccagagccagacccattttttcctggtcagctttggttttcggttcaactgcgatggagattaccggctcagggaattccatacgttccagaatgatcggcgcatccgggtcacacagggtgtcaccagtggttacgtctttcagaccgatagcagcagcgatgtcgcccgcgcgaacttctttgatctcttcacgtttgttagcgtgcatctgaacgatacgaccgaaacgctcacgtgcagctttcacggagttcagtacggtatcaccagagttaaccacaccggagtaaacacggaagaaggtcaggttaccaacaaacgggtcggtagcgattttgaacgccagtgcagagaacggctcgtcatcacttgcgtgacgttcagccggagtgtctttaccgtcgtccaggataccgttgatcgcaggtacgtcaaccggggatggcaggtaatcaattaccgcatccagcatcgcctgaacacctttgttcttgaacgcagaaccacaggttaccaggatgatttcgttgttcagaacgcgctgacgcagagcacctttgatttctgcttcagtcagttcttcaccacccaggtatttttccatcagctcttcagaagcttcagctgcggattcgatcaggttctggtgccattcgttagccagttcaaccatgtctgccgggatatcttcgtattcgaaggttacgccctggtcagcgtcgttccagttgatagctttcattttcaccaggtcaacaacaccggtgaaatgttcttcagcaccaatcgccagctgcagcggaaccgggttcgcgcccagacgggttttgatctggttaacaactttcaggaagttcgcacccatgcggtccattttgttaacgaacgcaatgcgcggaactttatatttgtttgcctgacgccatacggtttcagactgcggctgaacaccaccaactgcgcagtaaaccattaccgcaccatcgagaacacgcatggaacgttctacttcgattgtgaagtcaacgtgccccggggtgtcgatgatgttgatgcgatgcggctcatactgcttagccataccagaccagaatgcagtagtcgcagcggaagtgatggtaataccacgttcctgctcctgctccatccagtccatggttgcagcgccgtcatgaacttcaccgattttatggtttacaccggtgtagaacagaatacgttcggtagtagtggttttaccggcgtcgatgtgcgcactgataccgatgttacggtagcgtgcgatgggtgttgtacgagccatttgtttcctcgtttatcttttaggcgttcaatttaagtagcccaaagcgggctgcttactggaagcgcccgcctggtgactaaaactccgaagggataaccaacggtagtgtgcgaacgccttgttggcttcggccatacggtgaacgtcttcacgtttcttaactgcagtacctttgttttctgcagcatcagaaagttcgttcgccaggcgcagagccatggatttatcaccgcgtttacgagcagcttcaacgatccaacgcattgccagagcattacgacgaaccggacggacttcaactggtacctgataagtagaaccaccaacgcggcgagacttaacttctacagtcgggcgcacgttttcgagagctacttcgaatgcttccagttcagatttaccagagcgctgagccagggtctccagcgcgctgtatacgatagattcagcagtagattttttaccatctaccatcaggatatttacaaatttagccagcagttcacttccgaacttcggatccggcagaattttacgctgaccaatgacgcgacgacgtggcatggaaatactccgttgttaattcaggattgtccaaaactctacgagtttagtttgacatttaagttaaaacgtttggccttacttaacggagaaccattaagccttaggacgcttcacgccatacttggaacgagcctgcttacggtctttaacgccggagcagtcaagcgcaccacgtacggtgtggtaacgaacacccgggaggtctttaacacgaccgccacggatcaggatcacggagtgctcctgcaggttgtgaccttcaccaccgatgtaggaagtcacttcgaaaccgttagtcagacgaacacggcatactttacgcagcgcggagttcggtttacgaggagtggtagtatatacacgagtacatacgccacgtttttgcgggcatgcttccagcgcaggcacgttgcttttcgcaactttgcgagcacgtggtttgcgtaccagctggttaactgttgccattaaatagctcctggttttagcttttgcttcgtaaacacgtaataaaacgtcctcacacaatatgaggacgccgaattttagggcgatgccgaaaaggtgtcaagaaatatacaacgatcccgccatcaccaggccatctggctggggtgcttaaccgtaagtctgacgaaatcagtatagtcaatgagaatgatgtcgttgctaatttgaccagtcaaaccgcgggcaataaggtcttcgttcagggcatagaccttaatgggggcattacgcagactttcaaggtagcggttaccgtcaactgcggcagttacgccatcttgcaataatagcagttcgtctccttcactgagcagacgcagcagcgcagcaaaatccgtcagccagggactgcgatgtaatgtgtgcagcataaacgcctcaaaacctcaaaataacatcgtagttggcgagttcgcggcgtaaggcatctgcttcgagcggcgtggcttcgacaacaaagggtgtctgcggatctaacccgcgttcgcgcagactagccgcacaaacccagcactgttcaatgtcgtacagacccaacaatttaaaagtggcaatgtaatcacgcgccagcactgcatcgggcttttgtcctggcagcagctgaaaaacgccatcagctataaagaagacagccagatcgtcagttaatgcggaagttgccagtaaagcatctaaaccttcccggcctgcggctgtaccatgaggtgcagtagaaaaaacaaacgcaattcgtttcatcagaactgtaccaccctgtcacaggtcaggctggcttccgccagcgccccaagtccgcttaaggtaaatccctgctgaaggttactgctagccagccccagtcttccggcctccgtttcatcaacaacgccacggcgtaatgctgccgctacgcagatattcagcgccacaccatgttgcgcattcagttgttgccaggcccgtacgaggtcaaattcgtcacttgccggagaggtcaattggttagcgttatagaccccttcccgatagaaaaagacgctgcttaactcatggccatctgctatcagcgcctgcgcaaactgaaaagcactactcgcctgttgcgtaccgtatgctggcccggtcaccacgatggcaaaacgcattacttatcttgcccctggaaatcaccgctcttgaactggcggatgtagagatagacagtgtgtttggagatgttcaggcggtcagcaacctggttgatcgcatctttaatatcgaagatccctttctcgtagagattcagcacgatctgacgatttttggcgttattagaaacattgcgatcggcattcacttcttcgatggtgaactccagcgtttgggtaaccagatcttcaacagaagaggcaaagttgacgctactaccgacatccggggtttctggcggcacaaaggtgctcataatctggctgaagggaacatcaagattcatattgatgcacagcagaccaattacacgctgttcgcggttacgaatcgcgatagtcagggacttcattaatacgccgcttttggcgcgagtaaagtagcatttagaaacgctgctatccgctcccgtcatatcgtgcagcatacgtagcgccaggtcagtaattgggctaccaatcttccggcctgtatgttcaccgttagcaatgcgaatggcactacattttagatcctgcaaagagtgcaaaacgatttcacagtgggagccaataagcatcgctaacccgtccaccaccgcttcgtaggatttcagaatatcaaaatcggtctggtcgaaaggacgttgatccagtaaatccaactcactggtttcgttggttaaaaggctcctggacatgaaaaaaaacactccttttcaggagcctgtcgttaacttttcagggcaggctcattaatgatgcgggtaactaaattaatacagcggaggttccgctttccagcactaattatatccggcctgtaataaaaaaaccgccgcctggtcaggcggcggttcttaatgcttattttttagcagaatctgcggctttcgcatcagcttccggctttgcatcagccttcggcgctggtttcacatccagcagctctacgtcaaacaccagggtagaattcggtgggatccccggaacacccgctttgccgtaagccagttctggtggaataaccagtttgatcttaccgcctttcttgatgttcttcagaccttctgtccaacccgggataacaccgtccagacggaaagaaagcggttcaccacgggtgtaagagttgtcgaactctttaccgtcgatcagcgtacctttgtagttcactacaacagtatcgctgtctttcggtgcttcgcctttaccggcttctactacctgataaaccagaccagtactagaggttttcacacctttctctttggcaaatttctcgcggtactctttaccttttgcttcgttatcagccgcgtctttttccatcttcgcctgagcagaagacttcacgcgagcttcgaatgcttgtagagtctgttcgatctcttggtcggagagtttgcttttatcagcaaatgcatcctgaacaccagcgatcagctgatctttatccagtttgatgcccagtttttcttgttcttttagagagttttccatgtaacgacccaggctggcacccagtgcataagcacttttctgatcgtcatttttgaacgctgctttgctgtcagcagctgtagcaggttttgcagcttcagcagcaaaagtgattggtgcatgcagggcaacggccattgtggtcgccagcagcgttactttaaacagacttttcatccatatctccaggatcggggcatctcaccccagggttaactattatcagaagggtactataaagcgttgtcgaacaaatctacatacagacacgccctattatcatctattttcagactctttttgtttaaattagtttcgatgaccgcgaaatgagtgctgtctcgggcagcaaagttaagtagaatccgcggcgaccattcgacaaaagaggtgaatcatgcaggatttaagtttggaagcacgcctggcagagctggagagccgactggcttttcaggaaatcaccattgaagaactgaacgtcacggtgaccgctcatgaaatggagatggcgaaactgcgcgatcatctgcgtctgctgaccgagaagttaaaagccagccagccgagcaacatcgcgagccaggctgaagaaacgccaccgccacattattgaggcgtaaaaaaagcggggattccccgcttttttgtcactttttcggtattagtggcaaccgcaaccgccgttgcctttaccgccacagcagccttcgccaccgtgttcatgaccgtgatcgtggccatgaccgccgcagcaaccgtcgtggtcgtgatcgtggtggtgatcgtgcgcgccgtgaacgtgaccatgagccagttcttcttcagtcgcttcgcgaatcgccacaacttcaacgttgaatttcaggttctgaccggccagcatgtggttaccatcaaccacgacgtgatcgtcttcaaccgcagtgatttcaaccggtaccggaccctggtcggtttcagccaggaaacgcatacctacctgcagttcatcaacgcccataaatacgtctttaggaacacgttgcaccaggttttcgtcgtactgaccgtaagcgtcgttcgcgccaacagcgacatcaaatttgtcgccaacttcatgaccttccagcgccgtttccaggccagagatcagggaaccgtgaccatgcaggtagtccagcggcgcactcaccggagactcatcaaccaacacaccgtcttctgtacgtacctgataggccaggctgaccaccaggtcttttgctactttcatgatatctcctgagcatgggaagaatagtggcgcagattgtagcggaattctgcagccgtgtactcactagcttaaaaaaactcggcgcatatcgttagtccggatgaaaaatcccgatcacttgctcatctttgcgaacgtgatcgcgggcttctttgtctgcttctcgcatctgatgtccgcacttaacacattcaacaatatcaatattattttcgcgccacatcgccatactatcctgcgcctgacaggccgggcattttgcgcccgcaataaaacgttttcggattgccatctttaccctttactcaaattcatcccagccgtccagctggcgtcgttcttgttgcatttcacgctggaaaatctcttccagttcgcgtcgggcttccctggcgcgagaaatttgtacggtatcggcatgcattgggatgagctctcgcagcatccgcatatccaggcggcgaaaatgcagttgcgctcgctgtgcctgatgcggatgcatgccaagcgtgaccagcgtcttgcgccccagctctaacgcactggagaatgtttcacgggaaaactgcgtcacccctgcctgtaataactcatgcgcttccacacgtccgcgcgctcgcgcaagaatatgcaaatgcggaaagtgctgttggcatatttccaccagcttcatggtgtcttccggctcgttacaggtaatgacgatagactcagcggcctctgcacccgcagaacgtaaaagatcgacctgcgtggcgtcgccgtaataaactttgtagccgtatttacgcatcaggttaacggcgctgatatcccgctccagcacggtaatgcgcattttatttgccatcagcaaacgaccaatcacctgaccaaaacgcccgaagcccacgacaatgacctggggtttatcatcgttgacccacggtttttcgtcttcttcttccggtccgttaaactggcgggatagccatttatccaccagcttcatcagcaacggcgtggtcatcatggaaagcgtcaccgtcaccagcaacaacgccatctggtcgccctggaataagcgttgactagaagcggtagaaaagaggacaaaggcaaactcaccaccctgactcaacacgccagcaaactgcatccgctcactgctacgcacgccatacaatcgcgccagcagatacagcacgagaattttcaccgccaccagcacaaccacgcttatcactacccacaacagatgggtataaagcaccccgaggttgagactcatgccgacagagataaagaacaaaccgagcagcaagcctttgaagggatcgatagccgtttccagttcatggcgatattcactttccgccagcagcacgcccgcaataaatgtaccgagcgccatgctcagccccagcgcatccataaacaatgcggaacccaacaccagcagcagcgtcgcggcggtgaacacttcccgcacgccagaagctgcaataaagcggaataccggacgcagtaaatagcgcccaccaatcagcatgccgacaaacgccagcaccttcatgccgaccttcatccagtcgaaatgttcgtctgcgctccccgccaacaacggcactaacgccagtgctgggattactgccagatcctgaaacagcagaacgctaaacccgagctggccggattcgctgcgattcatccctttctcacgcatcaattgcaacgccattgcagtactagacatcgcaaggccaatgccaccgaccaccgccgcctgccaggcgaaatccgtcagcatcaataatcccgccagcaacgccgcgcttaacagcacctgtgccgcgcctacgccaaaaatgctacgccgcagttgccaaagtttggagggattcaactcaaggccgatgataaacatcaggaataccacgccgagttcgctaaagtggaggatctcatcgacgtcgctaataaaccccagcccccacgggccaattgcaatccctgccagcaaatatcccaacacagcgccaatacccagccggcttgccagcggcaccgcagccaccgccgcgaagagaaacagcactcctgcgagtaaaaaatcggaaccttccatcagcggcctcctggagacagcggatttgccagccagtcaccgtaggctctggcgtggctcgccagctcctgtgcgctttgccgtctcgcccagtaaataatgatgggacttaaccaatgcatccggcacatgcccgccgccagttcaaaggggcgcagcacatcgctcatcgggtagcgattcagcgcgtcataacggtaagcactttccggctcgccggtggtaatcacgctacgccagtactttcccgccagttggtttcctcccggcccgctggcaaaaccacgacttaatacccggtccagccactctttcagtagcgccgggcagctataggtataaagaggatgctgaaagacaatcacctcgtgctcgcgcagtaatgcctgctcacgggggatatcaataaaaaaatcgggatagtgcgcgtaaaggtcgtgcacggtaacattgctgagctgcgtggccggtttaagcagtacccggtttgccacgctgtcctgagattccggatgggcatacagcagcaaaactttcgctggctgagacatcatccccctcccggtatggtttttgtgtatagtcgctgttttgggctaccattgcgcccggtgcggcagctcgcccatacattacattatcataatgataagttaacatagtctgaacatacggcaccttatgattgttttctccagcttacaaattcgtcgcggcgtgcgcgtcctgctggataatgccaccgccaccatcaaccctgggcagaaagtcggcctggtgggtaaaaacggctgtggtaaatctaccctgctggcattgctgaaaaatgaaatcagcgccgacggcggcagctacacctttccgggaagctggcaactggcgtgggtgaatcaggaaacgccggcgttaccgcaagcggcgctggaatatgtcattgacggcgaccgtgaatatcgtcaactagaagcgcagctacacgacgccaacgaacgtaacgacgggcacgccattgcgaccattcatggcaagctggatgctattgacgcatggagtattcgctcccgtgctgccagcctgctgcacggcctcggtttcagcaatgaacaactggagcgcccggtaagtgatttttccgggggctggcgtatgcgtcttaaccttgcccaggcgctgatttgccgtagtgacttgctgctgctcgacgaaccgactaaccacctcgatctcgatgccgttatctggctggaaaaatggctgaagagctatcagggcacgctgatcctgatctctcacgaccgcgacttcctcgatccgatcgtcgataaaattattcatatcgaacaacaaagcatgttcgagtacaccggcaactacagtagctttgaagtacagcgcgccacccgtctggcgcagcaacaagcgatgtacgaaagccagcaggaacgcgtagcgcatctgcaaagttatatcgaccgtttccgtgccaaagccaccaaagcgaagcaggcccagagccgcattaagatgctcgagcgtatggagctaattgcccccgcgcacgtcgacaacccgttccgctttagcttccgcgcgccggaaagcctgccaaatccgttactgaagatggaaaaagtcagcgcgggctatggcgatcgcattattctcgacagcattaaactgaacctggtgcccggcagccgtattggtctgttaggccgcaatggcgcgggtaaaagcacattaatcaaactgttagccggtgaacttgcgccagtcagcggtgaaattggtctggcgaaagggatcaaactcggctacttcgcccagcatcaacttgaatacctgcgcgccgacgaaagtcctattcaacatctggcacgtttagcgccgcaggagctggaacaaaaactgcgtgactacctcggcggctttggtttccagggcgataaagtaaccgaagaaacgcgccgcttctccggtggggaaaaagcccgcctggtgctggcattaattgtctggcagcggccgaatctgctgctgctcgacgaaccgactaaccaccttgacctcgacatgcgtcaggcactcaccgaagcattaatcgagtttgaaggcgcgctggttgtcgttagccacgaccgtcatttgctgcgttccaccactgacgatctctacctggttcacgatcgtaaagtcgaaccgttcgacggcgatctggaagattatcaacagtggttgagcgacgtacaaaagcaggaaaaccagaccgacgaagcgccaaaagagaatgcgaacagcgcccaggcacgtaaagatcagaagcgtcgggaagctgagctgcgtgcgcaaacccagccactgcgtaaagagattgcccgtctggaaaaagagatggagaagctgaacgcgcaactggcgcaggcggaagagaaactcggcgacagcgaactgtatgaccagagccgtaaagcggagttgaccgcctgcctgcaacagcaagccagcgccaaatccggcctggaagagtgcgaaatggcatggctggaagcccaggagcagcttgagcagatgctgctggaaggccaaagcaactgatggcgcagataacgacgaccgatgccaatgaattcagcagcagtgctgaattcatccccatgcgcggctttagcaattgtcatctgcaaaccatgctgccgcgtctgtttcgtcgtcaggtgaaattcaccccgtactggcagcggctggagttgcccgacggcgattttgtcgatcttgcgtggagtgaaaaccctgcacaggcgcaacataaacctcgtctggtggtgtttcacgggctggaaggcagtctcaacagcccttacgcccacggtctggttgaggcggcgcaaaagcgcggctggctgggcgtggtgatgcattttcgcggatgcagcggtgaaccaaaccgtatgcaccgcatttaccatagcggcgaaaccgaagacgccagttggtttttacgctggctgcaacgcgaatttggtcatgcgccaacggctgccgtcggctatagcctcggcggtaatatgctggcctgtttgctggcaaaggaaggcaatgatctcccggttgatgcggcggtgattgtctctgcgccgtttatgctggaagcctgtagctatcatatggaaaagggcttttcccgcgtttatcagcgttacttgctgaacctgttaaaagccaatgccgcgcgcaagctggcagcctaccccggaacgctgccgattaatctcgcgcagttaaaaagcgtacgtcgcatccgtgaatttgacgatctcatcaccgccagaattcacggctacgccgacgctatcgactattatcgtcagtgtagcgccatgccgatgctgaaccggatcgccaaaccgacgctgattattcacgccaaagacgatccgtttatggatcatcaggtgatcccgaaaccggaaagtctccccccgcaggtggagtatcaactgactgaacatggcggtcatgttggctttattggcggtacattacttcatccgcaaatgtggctggagagtcgcattcctgactggttaacaacgtatctggaggcgaaaagttgttgatattaacgtatctggaggcgaaatcatgttgattccgtggcaagacctctcccccgaaacgctggaaaatttaattgaaagctttgtgttacgtgaaggcaccgattatggtgaacatgagcgtacacttgaacagaaagtcgccgacgtcaaacgccagctacagtgcggagaagcggtgctggtatggagcgagctgcacgaaacggtcaatattatgccgcgcagtcagtttcgcgaataacctgcaaccgtcggcggacgagataataatgatagctaagtcatggagttactatgtctgccaaacatccggtcattgcggtaacaggatccagcggcgcggggaccaccaccaccagcctcgcgtttcgtaaaatattcgcgcagttaaatctgcatgcagctgaggtggaaggcgacagttttcaccgttacacccgcccggaaatggacatggcgatccgcaaagcgcgcgacgccgggcggcatatcagctacttcggccccgaggctaacgacttcggcctgctggaacaaaccttcattgaatacggtcagagcggcaaagggaaatctcgcaaatatctgcatacctacgacgaagccgtaccgtggaatcaggtaccggggacattcaccccctggcaacctttaccggaacccactgatgtactgttttatgaaggtttacacggcggcgtagtcacgccacagcataacgttgcgcagcatgtggacttactggtcggcgtggtgcctatcgttaaccttgagtggattcaaaaactgatccgcgacaccagcgagcgcgggcacagtcgagaagcagtgatggacagtgtagtgcgtagtatggaagactatatcaactacatcacaccgcagttttcccgcacccatcttaacttccagcgcgttcccaccgtcgacactagtaacccgttcgcggcaaaaggtatcccgagcctcgatgaaagctttgtggtgatccattttcgtaatctggaagggatcgatttcccctggctgctggcgatgttgcaaggcagtttcatttcccacatcaatacgttagtggtaccgggcggcaaaatgggtctggcaatggaattaattatgctgccgctggtgcaacgattgatggaaggaaagaaaatcgagtaactctgctattacgccggataaaatactatccggcttcacaacgggatagttaagtcacgcggcaaccacttcatagctgtgagtaatattcaccgctttttccagcatcaacgccacactacaatatttctcggcagagagatcaaccgcacgcgcaaccgctgcgtctttcaggtcgcgaccggtgacgataaaatgcagattaatgtgcgtaaacaggcgtggtgcctcttcgcggcgttcagaggtcaattttacttcacaatcgaccacatcctgacgccctttttgcaggatgctaaccacatcgatggcactgcaaccacccgccgccatcaacaccatttccatcggacttggtgctttatcgccactgttgccgtccattaaaatctgatgaccagaggcggattcgcccagaaaagttaacccttcgacccacttcactcgcgcttgcatttttgctactccactgcgtcaattttcctgacagagtacgcgtactaaccaaatcgcgcaacggaaggcgacctgggtcatgctgaagcgagacaccaggagacacaaagcgaaagctatgctaaaacagtcaggatgctacagtaatacattgatgtactgcatgtatgcaaaggacgtcacattaccgtgcagtacagttgatagccccttcccaggtagcgggaagcatatttcggcaatccagagacagcggcgttatctggctctggagaaagcttataacagaggataaccgcgcatggtgcttggcaaaccgcaaacagacccgactctcgaatggttcttgtctcattgccacattcataagtacccatccaagagcacgcttattcaccagggtgaaaaagcggaaacgctgtactacatcgttaaaggctctgtggcagtgctgatcaaagacgaagagggtaaagaaatgatcctctcctatctgaatcagggtgattttattggcgaactgggcctgtttgaagagggccaggaacgtagcgcatgggtacgtgcgaaaaccgcctgtgaagtggctgaaattagctacaaaaaatttcgccaattgattcaggtaaacccggacattctgatgcgtttgtctgcacagatggcgcgtcgtctgcaagtcactagtgagaaagtgggcaacctggcgttcctcgacgtgacgggccgcattgcacagactctgctgaatctggcaaaacaaccagacgctatgactcacccggacggtatgcaaatcaaaattacccgtcaggaaattggtcagattgtcggctgttctcgtgaaaccgtgggacgcattctgaagatgctggaagatcagaacctgatctccgcacacggtaaaaccatcgtcgtttacggcactcgttaatcccgtcggagtggcgcgttacctggtagcgcgccattttgtttcccccgatgtggcgcagactgatttatcaccccgatatcaactatgcacttcgacaaacgctggtgctatgtttgcccgtggccgttgggttaatgcttggcgaattacgattcggtctgctcttctccctcgttcctgcctgttgcaatattgcgggccttgatacgcctcataaacgttttttcaaacgcttaatcattggtgcgagcctgtttgccacctgtagcttgctgacacagctactactggcaaaagatgttcccctgccctttttgctgaccggattaacgctggtacttggcgtcactgctgagctggggccattgcacgcaaaattgcttcctgcaagcctgctcgccgccatttttaccctcagtttggcgggatacatgccggtctgggaaccgttgctcatctatgcgttgggcactctctggtacggattgtttaactggttttggttctggatctggcgcgaacaaccgctgcgcgagagtctaagtctgctgtaccgtgaactggcagattattgtgaagccaaatacagcctgcttacccagcacaccgaccctgaaaaagcgctgccgccgctgctggtgcgccagcaaaaagcggtcgatctaattacccagtgctatcagcaaatgcatatgctttccgcgcaaaataatactgactacaagcggatgctgcgtattttccaggaggcgctggatttacaggaacatattagcgtcagtttgcatcagccggaagaggtgcaaaagctggtcgagcgtagccatgcggaagaagttatccgctggaatgcgcaaaccgtcgccgctcgcctgcgcgtgctggctgatgacattctttaccatcgcctgccaacgcgttttacgatggaaaagcaaattggcgcactggaaaaaatcgcccgccagcatccggataatccggttgggcaattctgctactggcatttcagccgcatcgcccgcgtgctgcgcacccaaaaaccgctctatgcccgtgacttactggccgataaacagcggcgaatgccattacttccggcgctgaaaagttatctgagtctaaagtctccggcgctacgcaatgccggacgactcagtgtgatgttaagcgttgccagcctgatgggcaccgcgctgcatctgccgaagagctactggatcctgatgacggtattgctggtgacacaaaatggctatggcgcaacccgtctgaggattgtgaatcgctccgtgggaaccgtggtcgggttaatcattgcgggcgtggcgctgcactttaaaattcccgaaggttacaccctgacgttgatgctgattaccaccctcgccagctacctgatattgcgcaaaaactacggctgggcgacggtcggttttactattaccgcagtgtataccctgcaactattgtggttgaacggcgagcaatacatccttccgcgtcttatcgataccattattggttgtttaattgctttcggcggtactgtctggctgtggccgcagtggcagagcgggttattgcgtaaaaacgcccatgatgctttagaagcctatcaggaagcgattcgcttgattcttagcgaggatccgcaacctacgccactggcctggcagcgaatgcgggtaaatcaggcacataacactctgtataacagtttgaatcaggcgatgcaggaaccggcgtttaacagccattatctggcagatatgaaactgtgggtaacgcacagccagtttattgttgagcatattaatgccatgaccacgctggcgcgggaacaccgggcattgccacctgaactggcacaagagtatttacagtcttgtgaaatcgccattcagcgttgtcagcagcgactggagtatgacgaaccgggtagttctggcgatgccaatatcatggatgcgccggagatgcagccgcacgaaggcgcggcaggtacgctggagcagcatttacagcgggttattggtcatctgaacaccatgcacaccattagcagcatggcatggcgtcagcgaccgcatcacgggatttggctgagtcgcaagttgcgggatagcaaggcgtaatgcaggctaaaccatcggataaggcattcacgccgcatccgacatcttttgcctgatgcttcgtatttacgccccaaccaccttcgccaccgcgtgggcgaaacgttgcatcccttcatcgatatccgcatcttccaccaccaggctcggtgcaaaacgcatcacatccggtccggcattcagcaccattacgccagcctctgcgcccgcatacaggaaatcacgcgcccgacctttgtactgtggtttcagctctgcgccaatcaacagccccataccgcgaatatcgctaaatacatcgtactgctgatcgatcttctgcagatggtcaacaaaacgctggcgtttcgcctgaatgccttccagcacttcaggggtattgatgatatcaaacgccgcccccgctactgcacaggccagaggattaccgccgtaggtggaaccgtgagaaccaggatgaaacgcagaagcaatttccgccgtggtcagcatggcgctaatcgggaagccgccgcctaacgctttcgcagaggtcagaatatccggcgtaacgccgtagtgcatgtaagcaaacaaatcgccggtccgccccatcccgcactgcacttcatcaaacaccaataatgcctgatgttgatcgcacagctcgcgcaagccctgcaaaaactctggcgtcgctgccgtcacaccgccctcgccctggatcggctcaaccaccaccgcacaggtgtgatcatccatcaccgctttcactgcatggagatcgttaaagggaacgtggatgatgtctgccggtttcggcccaaagccgtcggaatattttggctgcccacccacgctaacggtaaacaggctgcgaccatgaaaagcgttatggaaggcaataattttggttttgaacgggctatgacgcacacaggcgtaatggcgtgccagtttaaaggcggtttcgttagcttccgtgccggagttcataaacaccacgcgttcggcaaacgttgcctcaatcagtttacgcccaagacgcagcgccggttcattggtgaaaacgttactgatatgccacagagtttcgccctgggtttttaacgcgttcaccagcgcaggatggcaatggcccaacgccgtaactgcaatgccacccgcgaaatcgacatactccttgccttgctgatcccagattcggctgccctgaccttttaccggaataaactctgccggagcataaatcggcaggatcacttcatcgaaagtcgcgcgtgtaattgctgtttgttcaattgccatctcatgatcaccctgttacgcataaacaaatgtgaaattataaccacaaaatatgcataaaaaatcactaaatggcaatcagaaatcagcgatgcaggaaattagccagcagttgatgtccttgttcgctaagaatactttctggatggaactgcacaccttccagatcccactggcgatggcgaatccccataatctctcgggtttcgctccaggccgtcacgtcaaagcacgctggtaaactgtcaggttccaccaccaggctatggtagcgtgtcacggtaagtggatttgccagcccccgaaatacgccctcaccgttatgtgtaatcgggctggttttgccgtgcatgacctttgcggcgcgcacaactttaccgccaaatgcctgcgccattgcctgatgaccgaggcagacgccaagaatcggcaagcgcccggcatagtggcgaataacgtcaagggagatcccggcttcatctggcgtacaggggccaggactgatgacaattttttgtggtttaagggcgtcgatatccgccagcgtcaacgcatcgttgcgcttaaccagcacatccgcccccagttcacaaaagtactggtagaggttccaggtaaaagaatcgtagttatctataagcaggatcatggcggctccggtacaaaagaaccgcgctattttactcagattccccggcttcgcttaccactttgctaaatatcatctgcagtgcggtgagatcccccattgccccactctgatttgcctgattccaggcctctttttcgataccctgccagctcagttgatatccggcatgaatcgccagttgctcgaagaagatccgctgtgccagaccacttcccacccggaagggatgcagcacgttgatttcacaatagtaatgcgccagccgctcgacgaacttcgctttctccaggccaaccagataaccttcttcctccagatcctgcatcagggcattgccctctttttcgatataagcaaagtggcagaacggcgtatcaccctgataaatatcaacttcacgcagttgccctgcccagtcgaaaatatcctgatacagctggcgatggatagttcgcaaatgcggtaaaccgcgcaccagcggaccaagctcaatggtcgcagcacgcagcgccgtcatttcgtaagcggcctgttccagccgctgctgctggcggatgttcagccggttacgcatgatatcaaggcctggataaagatacggatcgcgcccttcgccgaatttatcgctcatagtgactcctcagctcttcaaggcgcgctaaagcctctgcggcagtaagagtgactaaaggcatctcgacgccttcaagacggcgactggcctgaaaattacgattacgctgaagctcccagagacgggacttttgcttatcggtgagtttcttcacttgatgcctccctgaacgtgtccatttgccacaagtataagcggcaaatccgggttacgccgggagagcagaagcgcgggcaagattgcccgcgcgagaaatcattacggcaggactttagcggaaaggataactaccggtttactcggcacattctggtacggaccaacgtcatgagtcggcacctgggaaatcttatcggcaacgtccatgcctttcaccactttaccaaataccgcgtaaccgaaatcacgctgaccatggtcaaggaaggcgttatcggcaacgttgataaagaactggctggtggcgctgtctttgtcagcggtacgtgccatcgcgatggtgccacgcgtgttgcgcaggccgttatcggcttcatttttgattggcgggtttggttttttctgctgcatctgctcggtgaaaccgccgccctgaatcataaagccaggaatgacgcggtgaaaggtagtgttgttataaaaaccgctgttcacataatcgacaaagttttgcacagacactggcgctttttgtttatccagctccagttcgatgttaccagcactggttgtcaacaatacgtgcgggtcccctttcgctgccattgctgcgggagaaagagcagaaagagcgaaaacagcagccatcgccgccagggtgcttttgaacatgagatttccttaacaaacagagcagaaaaaaagcaagtgaagagattctaaatagccttcaagaacaaggccatccctttacctaattttacgtatctgaaatatatgtaacctgacgatcactttttattccgtgatcaaaatcacctcttaaaatgcaatttagcaaccgattgcaataaaacatttaaacagatcacaaaatcacctaaaatcgcccgctcgcggcatatcccgctatgccattttatttttgaacgcaggccaatcatgactaacagcaatcgcatcaagctcacatggattagctttctctcctacgcactgactggtgcgttggttattgtcaccgggatggtgatgggaaatatcgccgattatttcaatctgcctgtttccagtatgagtaataccttcaccttcctcaacgccggcattttaatctctatcttcctcaacgcctggctgatggaaatcgtcccgttgaaaacgcagttacgttttggctttctcctgatggtgctggcggttgccggtttgatgttcagccacagcctggcgctgttcagcgcggcgatgttcattctcggggtggtcagcggcatcaccatgagcattggtacattcctggtaacacaaatgtatgaagggcgtcagcgcggttcccgcctgttatttaccgactccttcttcagtatggctgggatgattttcccaatgatcgccgcgtttctactggcgcgcagcattgagtggtactgggtttatgcctgcatcgggctggtgtatgtcgctatttttattctgaccttcggctgtgagttcccggcgctgggcaaacatgcgccaaaaacggatgctccggtagagaaagaaaagtgggggatcggcgtactgtttctctctgttgcggcgttgtgctacatcctcggtcagttaggttttatctcctgggtgcctgagtatgccaaaggcctgggcatgagcctgaacgacgcgggcacgctggtgagtaacttctggatgagttacatggtcggcatgtgggcgttcagctttattcttcgcttctttgatttgcaacgcattctgaccgtactggctggtctggctgcgattctgatgtacgtctttaacaccggaacaccagcacatatggcgtggagtattctcgctctgggcttcttctccagcgcgatctataccaccatcatcaccctgggtagtcagcagaccaaagtaccgagcccaaaactggttaactttgtcctgacctgcggaaccatcggtactatgttgacctttgtggttaccggcccgatcgttgaacatagcggtccgcaggcggcactgcttacagcaaacggtctgtacgctgtcgtctttgtgatgtgcttcctgttaggtttcgtcagccgtcaccgtcagcataacaccctgacctctcattaattgctcatgccggacggcactatcgtcgtccggccttttcctctcttcccccgctacgtgcatctatttctataaacccgctcattttgtctattttttgcacaaacatgaaatatcagacaattccgtgacttaagaaaatttatacaaatcagcaatatacccattaaggagtatataaaggtgaatttgatttacatcaataagcggggttgctgaatcgttaaggtaggcggtaatagaaaagaaatcgaggcaaaaatgagcaaagtcagactcgcaattatcggtaacggtatggtcggccatcgctttatcgaagatcttcttgataaatctgatgcggccaactttgatattaccgttttctgtgaagaaccgcgcatcgcttatgaccgcgtacacctcagctcttacttctctcaccacaccgccgaagagctgagcctggtgcgcgaaggcttctacgagaaacacggcatcaaagttctggtcggcgaacgcgctatcaccatcaaccgtcaggagaaggtgattcactccagcgccggacgtaccgttttttatgacaagctgatcatggcaaccggttcctacccgtggatcccgccaatcaaaggttctgatactcaggactgctttgtctatcgcactattgaagacctcaacgccattgaatcctgcgcccgtcgcagcaaacgcggtgccgttgttggtggcggcctgttaggtctggaagccgcaggcgcgctgaaaaacttaggtattgaaacccacgttatcgaatttgcccctatgctgatggcagaacagcttgatcagatgggcggcgagcagctgcgtcgcaaaatcgaaagtatgggcgtgcgcgttcacaccagcaaaaacacccttgagattgtgcaggaaggtgttgaagcgcgtaaaaccatgcgttttgccgacggcagcgaactggaagtcgactttatcgtcttctctaccggtatccgtccgcgcgataagctggcaacccagtgtggtctggacgttgctccgcgtgggggtattgtcattaatgattcctgccagacttccgatccggatatctacgccatcggtgaatgcgcaagctggaacaaccgtgtatttggtctggtagcacctggctacaaaatggcgcaggtcgccgttgaccatattctcggtagcgaaaacgcctttgaaggtgctgaccttagcgccaagctgaaactgctgggcgtagacgtaggcggtattggtgatgcgcacggtcgcacgcctggcgcacgtagctacgtttacctcgacgaaagtaaagagatctacaaacgcctgattgtcagcgaagacaacaaaaccctgctcggtgcggtactggtgggcgataccagcgactacggtaacctgctgcaactggtgctgaacgctatcgaactgccggaaaacccggattccctgatcctgccagcacacagcggtagcggcaagccgtctatcggtgttgataaactgccggacagcgcgcaaatctgctcctgcttcgacgtcaccaaaggtgatctgattgctgccatcaacaaaggctgccacacagttgcggcgctgaaagctgaaaccaaagcgggtactggctgcggtggctgtatcccgctggtcactcaggtactgaacgcggaactggcgaaacagggcatcgaagttaacaacaacctgtgcgaacactttgcttatagccgtcaggaactgttccatttgatccgcgttgaaggcattaaaaccttcgaagaactgctggcgaaacacggcaaaggctacggttgtgaagtttgtaaaccaaccgtcggtagcctgctggcctcctgctggaacgaatacattctgaagccggaacatactccgctgcaggattctaacgacaacttcctcgctaacatccagaaagacggcacctacagcgtgatcccgcgttctccgggcggtgaaatcaccccggaagggctgatggcggtaggtcgtatcgcgcgtgaatttaatctctacaccaagatcactggctcccagcgtctggcgatgtttggcgcacagaaagacgatctgccggagatctggcgtcagctgattgaagccggcttcgaaaccggtcatgcctatgcgaaagcactgcgtatggcgaaaacctgcgtgggtagcacctggtgccgctacggcgttggcgacagcgtcggcctcggcgtggaactggaaaaccgctacaaaggcatccgtacgccgcacaaaatgaagttcggtgtctccggctgtacccgtgaatgtagtgaagctcagggtaaagacgtgggtattatcgccactgaaaaaggctggaacctgtatgtttgcggtaacggcggcatgaaaccgcgtcatgcggatctgctggcggcggatatcgatcgcgaaacgctgatcaaatatctcgaccgcttcatgatgttctacatccgtactgccgacaaactgacgcgtaccgcaccgtggttagaaaacctcgaaggcggcatcgattacctgaaagcagtgatcattgacgacaaactggggctgaacgcacatctggaagaagagatggcgcgcctgcgtgaagcggtactgtgtgagtggactgaaacggtcaatacgccgtctgcgcagactcgcttcaaacacttcatcaacagcgacaagcgtgacccgaacgtgcagatggtgccagagcgcgaacagcaccgtccggcaacgccgtatgaacgtatcccagtaactctggtggaggacaacgcatgagccagtggaaagacatctgcaaaatcgatgacatcctgcctgaaaccggcgtctgcgcgctgttaggtgacgagcaggtcgcgattttccgcccgtatcacagcgatcaggtgtttgcgatcagcaacatcgacccgttcttcgagtccagcgtgctgagtcgcggactgattgcggaacaccagggcgagctgtgggtcgccagcccgctgaaaaaacagcgttttcgcttaagcgacggcttgtgcatggaagacgaacagttttccgtcaaacattacgaagcgcgagtgaaagacggcgtggtgcagctgcgcggttaatgttttaacgggaggcgcaatgcctcccctttttgcatggtcctgtaataatcttcggtatattgcaggacattttttaaactttttgttttattttttgtttttattttttaaaggataatcaaatgtttacagacactattaataagtgtgcggctaacgctgcgcgcattgcacgcctgagcgcaaataacccgctcggcttttgggtcagctccgccatggcgggcgcgtatgtgggtcttgggatcatcctgattttcacgctcggtaatttgctcgatccatccgtacgccctttggtgatgggcgcgacctttggtatcgccttaacgctggtgattatcgccggttctgaactgttcaccggacacaccatgttcctcacctttggggtaaaagcgggcagcatcagccacgggcaaatgtgggcaatcctgccgcaaacctggctgggtaacctggtcggttccgtcttcgttgccatgctctatagctggggcggcggtagcctgctgccggtagataccagcatcgttcactccgtcgcgctggctaaaaccactgcaccggcaatggtactcttcttcaaaggtgcattgtgtaactggctggtttgcctggcaatctggatggcgctgcgcactgaaggggcggcgaaatttatcgctatctggtggtgtctgctggcatttatcgcgtccggctacgagcactctatcgctaacatgacgctgttcgcgctctcctggttcggcaaccacagcgaagcctacacgctggcgggtattggtcataacctgctgtgggtgacgctgggtaatactttaagtggtgccgtattcatgggattgggttattggtatgctacgccgaaagcgaatcgtccggttgcggacaaatttaatcaaactgaaacggctgccggttaattactaaggggtttttacgtggatcatttgcctatattttgccaattacgcgatcgcgactgtctgattgtcggcggtggtgatgtcgcggaacgcaaagcaaggttgctgttagacgcaggcgctcgcttaacggtgaatgcattagcgtttattccacagttcaccgcatgggcagatgcaggcatgttaaccctcgtcgaagggccatttgatgaaagccttctcgacacctgctggctggcgattgcagcgacggatgatgacgcgcttaaccagcgcgtcagcgaagccgctgaagctcgtcgcatcttctgtaacgtggtcgatgcgccgaaagccgccagctttattatgccgagcattattgaccgcagtccgctcatggtagcggtctcctctggcggcacctctccggttctggcacgcctgttgcgcgaaaaacttgaaagtctgctgccgttacatctgggccaggtagcgaaatacgccgggcaattacgcgggcgagtgaaacaacagttcgccacgatgggtgagcgtcgccgtttctgggagaaattgttcgttaacgaccgcctggcgcagagcctggcaaacaacgatcagaaagccattactgaaacgaccgaacagttaatcaacgaaccgctcgaccatcgcggtgaagtggtgctggttggtgcaggtccgggcgatgccgggctgctgacactgaaaggactgcaacaaattcagcaggcagatgtggtggtctacgaccgtctggtttctgacgatattatgaatctggtacgccgcgatgcggaccgtgttttcgtcggcaaacgcgcgggataccactgcgtaccccaggaagagattaaccagatcctgctgcgggaagcgcaaaaaggcaaacgcgtggtgcggctgaaaggtggcgatccgtttatttttggccgtggtggcgaagagctggaaacactgtgcaacgcgggtattccgttcagcgtggttccgggtattaccgcagcttctggttgctctgcctatagcggtattccactcacgcatcgcgattatgcccagagcgtacgcttaattaccggacacttaaaaaccggtggcgagctggactgggaaaacctggcggcagaaaaacagacgctggtgttctatatggggttgaatcaggccgcgactattcagcaaaagctgattgaacacggaatgccaggcgaaatgccggtggcaattgtcgaaaacggtacggcagtcacgcagcgcgtgattgacggtacgctcacacagctgggagaactggcgcagcaaatgaacagtccaagcctaattattattggtcgggttgttggcctgcgcgataaactgaactggttctccaaccattaatttaacccgggccagagaattctggccttcttaatgactctttttatatattcagcaaataaaacatagccccttaataaatattatctgctaatgggttatattcaccgttacagcgacttacaaaattaagtcattcgctcactgacgccaattaaatattcctgtatcgttcttaacgagcagtctgcttatattcatataatcaatgaatattaattaatatataatacatagggaatgtaaatgaacaaatttattaaagttgcactggtaggtgcagtactggctacgttaactgcatgtactggtcatattgaaaaccgtgataagaactgctcttacgactacctgctgcacccggcaatttctatttctaaaatcattggcggttgcggtcctactgcacagtaagtctctgacagaaatcggctaacaccggtttaattgcccgacgccctctggattttccgagggcgtatttgtttctatgtccttcttgcccccgcccgtaaaaatattttcactttaaattcaatttgataactacatccattagccacagcgcgatcctgtgcgaaattttgtgatcttcctccacattacataacatcatatgttgttatattcatcatgcattgtcatgttaccttttaaatgactgcaaactctcccctacaacgtattggacaagaaaaaggtatcgctatgggaagccaggaactccaacgcaagctcggattttgggccgttcttgcaatcgccgtcgggacaaccgtcggctccggtatttttgtatctgtgggtgaagtggcaaaagcagcgggcacgccgtggcttacggtgctcgcgtttgtcattggcgggttaattgtgatcccgcaaatgtgcgtctatgcggaactatccaccgcttatccggaaaatggcgcagattatgtttatctgaaaaatgccggaagccgaccgctggctttcctctccggctgggccagcttctgggccaacgatgcgccgagtttgagcattatggcgctggcgattgtcagcaatcttggctttttaacgcctatcgatccgttgctcggtaaatttatcgccgccggattaattatcgcctttatgttgctacacctgcgctccgttgaaggcggcgcagcgtttcagacgctaattaccatcgccaaaattatcccgttcactatcgtcattggccttgggatcttctggtttaaagcggagaattttgccgcccctaccaccactgcgattggcgcaacgggcagctttatggcgctgctggcggggatctctgccaccagttggagctataccggcatggcctctatctgttatatgaccggcgaaattaaaaaccccggaaaaaccatgccacgagcgctgattggttcctgtctgctggttctggtgctctacaccctgctggcgctggtgatttccggcctgatgcccttcgacaaactcgccaattctgaaacgccgatttccgacgccctgacctggatccccgcactcggcagcaccgctgggatctttgttgccatcacggcgatgatcgtcattcttggtagcctttccagctgcgtgatgtaccagccgcggctggaatacgcgatggcgaaagacaacctgttctttaaatgcttcggccatgtgcatccgaaatacaacacgccggatgtctccatcatcctgcaaggggcgctggggatcttcttcatcttcgtttccgatctcaccagcctgctgggttatttcaccctggtgatgtgtttcaaaaataccctcaccttcggctccatcatctggtgtcgtaaacgcgacgattacaaaccgctgtggcgtactccggctttcgggctgatgaccaccctcgccattgcgagtagcctcattctggtcgccagtacctttgtctgggcaccgattcccggccttatctgcgccgtcatcgttattgctactggtctgcctgcttacgccttctgggcgaagcgtagccgccagctcaacgctttgagctaatgttatctggagaaaataaaatgttggatattgataaaagcaccgtggactttctggtcaccgaaaatatggttcaggaagtggaaaaagttctcagccatgacgttccgctggtgcacgccatcgtggaagagatggtgaagcgcgacattgatcgtatttatttcgttgcctgcggaagcccactcaacgcggcgcaaacggcgaaacatctggcggatcgcttttccgatcttcaggtctacgccatttccggctgggagttctgcgataacaccccgtatcgcctcgacgatcgttgcgcagtaattggcgtttctgactacggtaaaaccgaagaggtaatcaaagcgctggagctgggccgggcctgcggcgcactcactgcggcgttcaccaaacgcgcggatagcccgattaccagcgcggcggaatttagcattgattatcaggccgactgtatctgggaaattcacctgccgctctgctacagcgtggtgctggagatgatcacccgcctcgcgccgaacgcggaaatcggcaagatcaaaaacgatctcaagcagttgccgaatgcgctcggtcatctggtacgcacctgggaagaaaaaggccgccagcttggtgaactggccagccagtggccgatgatttataccgttgctgcgggtccgctgcgtccgctgggttacaaagaaggcattgtaacgctgatggaatttacctggacgcacggctgcgtgattgagagcggagagttccgccatggcccgctggagattgtcgaaccgggcgttccgttcctgttcctgctcggcaatgatgaaagtcgccacaccaccgaacgcgccattaactttgttaaacagcgtactgacaacgtgatcgtcatcgattacgccgaaattagccaagggctgcacccgtggctggcaccgttcctgatgttcgtgccaatggagtggctctgctactacctgtctatttacaaagatcacaacccggatgaacgccgctattacggtggtctggtggaatattaatccctctcccggcccggcaacgggccggatttacgcaaggagttacccgatgaaaacaggtatgtttacctgcggccaccagcggctgcctattgaacacgcatttcgtgatgcaagcgagctgggttacgacggcatcgaaatttggggcggtcgcccgcacgcgttcgcgccggacttaaaagcgggcggcatcaaacaaatcaaggcgctggcgcagacgtatcagatgccgattatcggctatacgccagaaaccaacggctatccgtataacatgatgctgggcgatgaacatatgcgtcgcgaaagcctcgacatgatcaagctggcgatggatatggcaaaagagatgaacgcgggttatacgctgatttccgcggcccacgcgggctatctcacgccacctaatgttatctggggacggctggcagagaacctaagcgaactgtgtgagtacgcggaaaacatcggcatggatctaatcctcgaaccgttaacgccgtatgaaagcaacgtcgtgtgtaatgctaatgatgtgcttcatgcgctggcgctggtgcctagcccgcgcctgttcagcatggtcgacatttgcgcgccgtatgtccaggcggaaccggtgatgagttatttcgacaaactgggcgataaattacgtcatctgcatattgtcgacagcgacggggccagcgacacgcattacattcctggagaaggcaaaatgccgctgcgggaactgatgcgcgatattattgagcggggctatgagggttactgtacggtggagctggtgacgatgtatatgaacgagcccagactctatgcccgccaggcgctggaacgctttcgcgcgctgctgccggaggatgagagatgaaaaccctggcgacaatcggcgataactgcgtcgatatctacccgcaactgaataaagcgttttctggcggtaatgcggtcaatgtggcggtgtactgcactcgctacggcatacagccgggatgcattacctgggtgggtgacgatgactacggcacaaagctgaagcaggatctcgcccgcatgggcgtcgatatcagccatgtccatacgaaacacggcgttaccgcacaaactcaggtggaactgcacgacaatgatcgcgtttttggcgactacaccgaaggcgtgatggccgactttgccctgagtgaagaggattacgcctggctggcgcagtatgacattgtgcacgcggcaatctggggacatgcggaagacgcattcccacagctgcacgctgcgggcaaacttaccgctttcgacttctccgacaagtgggacagcccgctctggcagacactggtgccgcatctcgattttgcctttgcctccgcaccgcaagaagacgaaacgctgcgtctgaagatgaaagcgattgttgcccgtggcgcaggaacagtgattgtcacgctgggtgaaaacggcagcattgcctgggatggcgcgcagttctggcgtcaggctcctgaaccggtgacggttatcgacaccatgggtgccggagatagcttcattgccggattcctttgcggctggtctgcggggatgacattaccgcaggcgatagcgcagggaacggcgtgcgcggcgaaaaccattcagtaccacggtgcctggtaagtataacgttggcgtgagcatcttcacgccaacgtgctgttacttgccggaaaacgaccctataatccgagtaattcattctttatttcagggtcgattatgagtgctacggaccgctactctcatcaactcctctacgctaccgtccgccagcgactgctggatgatatcgcgcagggggtttaccaggccgggcaacagatccctaccgaaaacgagctttgtacacaatataacgtcagccgcattaccattcgcaaagccatcagcgacttagtggcagacggcgtactgatccgctggcagggaaaaggcacctttgtacaaagccagaaagttgaaaacgccctgcttactgtcagtggttttaccgattttggcgtcagtcaaggcaaggcgacgaaagagaaagtgatcgaacaggaacgggtcagcgccgcgccgttttgcgaaaagctgaacatccccggaaacagcgaagtgttccatctctgccgggtgatgtatctcgataaagagccgctgtttattgatagtagttggatcccgctgagccgttatcctgactttgatgagatttacgtcgaaggaagctccacctatcagttatttcaggagcgttttgacacgcgagtggtcagcgacaaaaagaccatcgatatctttgccgccacccgcccgcaggcaaaatggctgaaatgcgaactgggcgaaccgttgtttcgcatcagcaaaatcgcctttgatcagaatgacaaaccggtgcacgtctccgaactcttctgccgcgccaatcgcatcaccttaactattgataataaaagacattaaccgtaggccggataagatgcgccagcatcgcatccggcgatgctggcgcgttgaattttacatcccgtacgttcccctcaccctaaccctctccccaaaggggcgaggggaccgttcagtacggaatttagcttgacggtgctatccagcattaaatactggcaatactctcacgcaaaatccgcagcaccgtctcttcaccgctgcgattcgggttaatgcgaatcgcacaatgttcactttgtggattcgcctggcgaaacgttccggaaaggcgataaaagagcggcgggatttcatatttgctctctgcacccaccgggtaaggcaaggcaccgcgcttttgcgcctcttccagcactctggcggcaatcggctgatgaaactcgacaatcaacaccttgctctgcgcattagcaatcaccgcgcttttcacttccggcaccgcaccaccgttaagcaaagccagcaaccgttcagatacccctgcctgcaccgcgtgcatcactggcgcaaacaccagaccacgcaatacttccagcgcctgtgcgccctggatctggctaccgccggagtaaagcgtggcgcgaatacggttgataacatcagcatcgccgaccactgcaccaacaccctctggcccaaatagcttgaagcaggaaaatgtgctgacattcgcgccgcattcacagccgattcgagccaccttcatcaccgcatagttgtcatcggttaacgctggaacacctgccgcgcgcaacgttgccagcacatctgccagcacgtagctgtcctgcggctgctggcgcgtatgctgcaccagcgccgcatccggttgttgctcgtcgacgacctgcttcagtgcgctcaggtcattgaaatcaacagtaataagcgtcagccccatctgctcaataataacccgtgtcgtcgggtaaacaggcgcgtcatgcaccagaagacgctgccccggtttgagcaaagccgccagcccggcgcgaatcgcgccagtccccgcgtcctgcaccagcgccgcagcctgtgcgtgaaatgcatcagccagcacctgttccacacgctgggtaacgcgcggttgattcagtcctggcgttaagcctaaatcaccgccagtaagaaactcgctgccggggaaatggcgacaaatgctatccaccagcgcaaactgcttttgctgcgcctcaataatcgtcaggctttgcagaggaaacgtcttcataggtgccttccttaagccggaacgaacaggccaagccagtaaagaacattcagcagaataccggtgatcattactgccacgaccggtgccgccattttctgtaccggacggcccagggattcgttgaggaagtaaatggcaaccgcgatagagaatccggtataacccgccatcttaattgctgcgaaaatgctaccgaccagcagcgccacttccatcagcatattcatggcgttacggatgttatcgctcgcattacgcacgctcgggtagcgtcccagccatttgccgatgctacgaagcagcaagacttccgcgctaataaccactgcgcctaataccgctgcaaccatcggattcgggctgagatagtccaccgcataaacaaaggtaaagcccgcaactgcatacacacccgttgctaacgcggtggtggcaatcaacggcacaaaccccagtccgcgcataaattctgccagagccgcctgattaatcagcgtttggctttgttccggcgttacgcctgcggaatatgctttctccagtgtgaagatgctcacttcactgccagcaaaaatcttcatgctggcaacggcggcaatcaatgctcccacgatggcgatatagggtaagtttttgataatccgactcgtgcgttcttcaaacacgctaagcccgctggcatcaatgtcattttcatcacgatgacgcaggtcgtgagttatcgcgatccccagcagcatcaccatgccaataaagatttcgatggattcagggttaagatgtgggaaatagcgcacgactaccacacgggtcatcagtaccaccacggcggcgatcagactttgcttccagccaaactggtagaaaatcgccaccagcgggaacagtgcaaaagcactaaccaccgggctgcttaattcccccaggctacctaatacatccaccggcagcgcggtcagcagctggtttactggcaacaggcaagtaaggatcaacacgccccagatagcgccaagaccaaacgccatcaggctgtttatcgccaggacgccgaggatatcggtaggaagaaagagtaaccatgcgttgagcagcccggttttcagggtaaaagagatccccacgctggccacaaaaccaatgctcagaccaaaagcgatactccccgcctcgcgacggttcatatagccttcaatcagttgcggcaggatcgggcggatgccgtcatgaaaaacagccgcgctgcgatgcgccagaaggcttgtcatacccgtcaggcacgccaccacgataatctgaatatacagatccatagtcgtgccttttatttcagatggttaatcagcatcggaatcgcgtgttcgacgtgctcaacggaaaggccaaacgccacttttccttcagcgatcattttggcgatatgctcgtctttcgctttaatgcctggtttggcaatggtgcaacttttgttatagcctatcaccgcgatggcaatgctcaatgccgcgcccgcaccggtattacacgcgccgatgtaataatccagttgcccggatttcaccttcattgccgcttccatgtcgttgtgaatgaaaacttcaaaacagccaggagccgtcgcttcaatagtttttttaatctgctcacgctgtaagcctgcaacgccaatctttttcatgagtctgtccttattggaaaaattgagagggattttcacgtaacatcacatccacatcggcctgactgaatccactctggcgcaattgcggaataaaggtggttagtaaatagtcatagccataaccaccgttggcttttaaatgggagcggcgcgtaatatccatgctcagcatgacgcggttcagcaacccacggtcgcgtagcgcatgaagcatcgcaatacgcttttcgtccgggtagtaactgttcttgccgatggtgtcgaactgcacgtacgcgccgagatcgatcatcttcaaaatgttgtcgaggttgtctttcagatcgcagtgaccaacggtgacgcggctaagatcaaccccgtgggcttgtagcaacgccagttgctccagccccatcgtgctgaagctcgtatgcgtggagatcgggcgtccggtctggttatgcgccagcgcagcggcaataaataccttctcttccagcggcgtaatctttccttcgctggtgccgatctccgcgatgatcccggctttcagctccgtgccatcgataccctgttcaatttcatcgaccatctcctgcgccagttcctgcacgctgcgggtcgccacatgttccgggaaaaacgcgtcctggtaataaccggtacaggccaccacgttgatccccgtctcgcgcattacatcaagcataaattgcgcattgcgccccatgtaacggttggtcatctcaatcacattacgcacgccccgggtcatcaggtcgttcatctcctggcaaatgaacgcatactgatcaaggcggcagtccacgttgtttttaaagccggagagatcaatatgcagatgctcatgggcgagggtgtaacccgtcggatcaaaactcatagggtgtctcctgcaaaccggagggaggaaagaaaagagcgaccattttgtggcggtggcgcgcggaaaaattcacacacggtagcccccacatcagaaagcgtggtgcgcacaccgagctgcgtagcgatcatcccttgctgataaaccagcactggcaccacttcgcgggtatggtggctgtgaccaatggtcggatcgttgccgtgatccgccatcacgaccaggcaatcatctggctgcatcgcctcaacaagccgggcaaggttacggtcaacgacctgcaaacgttcggcataacgtgcgacgtcttctgcatgaccagcgaggtcggtttcctgaatgttggtgcaaataaacgccgtcggatgggtgttaaattcgttgagggtgatatccataatccgctggctatccaccagattttgccagctcacgccataaggattgttgacgatatctgccaccttacccaccagcacggttggcacgcctgcttcatacagtttttgtggcacctgcactttttcatcgacgccatagcccatatgcacgacctggaaaccgttgtcataagcgccagaacgcggcgcattgataccaataaagcgcccttctttgctttctgcggcatcgagaatgcgttgactgtcggttaacaggccaccaaatgtaatgacccgaccgacctgtacctgctcacgcacgatacgaccaattttgattgcgtcgtcaaaagagatcacagagagattggcggtaatgttatagacctggcctaaatccgcctcgagattatcgccaatcgcaaccgcctgattgacccacagaaattgcagatcatcgccacggcgctccacctgccagccagcggaaactaatgcctgctcaacacggtcaatcacatcgcgaaaaggcatccgcagcggcggtaacgggcgcgtgcctaaaatttcctgatgccccataaaggtatcgccaccttcatgttgcagctctgccacgccccaggttgcggaatcactcggctgcatatcgcctggcgcataacccaatgcgttgattagccccagcgtctccagcgttggtagctgcaaatgcggcaactggctcaggatgtgaccacatgtattcgctcccgcatcttgcggacgcaccagcgtgacatctttcattgcccctacgccaaagctatcaatcactaacaccacaaatcgcgccattacgcccccagagagtttccaagactgtcataacgaccgacgatttccggttcgccacgatgaataccggacaccagcaccacatcgctacgggtgacaaaaatctgcgtgcgaaaacagagcaccactgcactgcttaccggaaactcgcctgccagcggcagggtgtagtcgatactgctgtcatccacagttttgagattggtttcagtaatcttttgattttctggcgtaaacaccaacgcatgttgcgcatgaccacgacgatagtaaccgccgccgtagcagtagctgtcgccacggaaatgatgggagatttcacttaaccagagcatcgcgatacgttcaggctgatcgccctgctggtttgccggaatagtgcccgtcagcgcatgaccgggttcggcatgagtcacaccgtattgcgccagtaatggcaggctagtgcagctggtcgcactaggcgcgttcagttgctcaagtgcaataccagatttcgccagttgatcccgtgcctgtatcagcgtgtgaagattcggtgtcggcaaaacttttccgacagcctcatcccaaagcaggcaagggaaatgggtaagtccggctaaatgcagccctggcagattctggatttcggcgacaatctccggcaacaccttgagggcaaaaccgctctcctggcccggataaagaaaatcatcgtcgctataaactttaagcagcacagactggattcgcccggccttcaccgccgccgcagaaacttcccgcgctttgtcgagagtaaacacggtgatgacgtcggtgccctgttcaacggcgtcagcaacctgatgacaagggatttgtaccagatgcccctgatgcgccacaggcaaaccagcgcggcgcatgactcgcgcctctttgtaatccaccgccacaatgccgctgtagcctaatgccagcaatttttccgccagccacggattacgaccaaactgcttggtcatcagatacagttcaatgccgtaaagccgcgccgtctcaatcagccgcttaccgttttccagtatctgatccacgtcgatcacccagctgtccggggcgatcttgccctgctgccacaggcttagtgcggcggaaatcagcgccgggttctggcgtttcaatgcttctacaaacatcttgttgcctcgtttctgttccttgaattaaatattcatttttttgaatatttaggttgtgcgacgtggatttgtcgggagcttcaaacctcttcgttagcagccatccataatccataaaggttggccagcaaatagccttcttcacacgggttaacttccagtgcgaattccttcaacaacacctgatgcaattgcacaacggcttgccagtggctggattgcgccagttctgccagcaactcgttatccagcggctctatttcttcaccacggcgactgcgcatcagtgcactcgccatatgtgtcatcgccatcgttccttgctcactgcgcaccggcagatggcactctgtttccagtacgttgacgacctgcatcatgcctttgcagatgtccttatcaataacgcctgcctcgcaaagcaggttgagtctggtttccatatcagatgcctttcgtttaataactcggttcctgttccccactcactacccgttgttgatgggcgagcagggcgtgtttatctacaacggcacgcagcagttgttgcattgggtaatcatcgactcgcgtcaggaccacggcttcggtggcctgtaaaaatcgcggatcgtctgtgagcggcgtcgcctctaatcccagcatggtcagttcgttttccgccaccacgttccagatcaccgcatcgacatcgcctttaacaatgcgttgtaaactctcgtgataagagagatcgactcgttccacatcactaccgccaaaaaaaacatcggtcatgattttctgatccgcgctacggttatccagccccacgcgcttcacgtttgcggactcgcctttacggcaaatcaactggtgctcgccaacgtaggtgtgcggccccaactccagcgcgaggcataagcctttttgcgtgagataactttccgccgctagtcggctaaccaccgccatgtcatacacgccattaagcagacactccacgcgaatatccgcgccacgcatgtgcgcatagtaaaaaggaatgccatcaaactgggctttcaatccgctcgccaggccttcgtacaaacgggtatagggcaagggcattgcacataccacgttgttgatatccacatgagtcagcaatgctttgttatccatctcgaccagataactgccattgcgcccacggcgttcaatccgtatcgctccgctactttccagcgttttcaacgcggcctgcgtcaggccaacggaactacggcattcatttgccagctcatctatggttttcaatcgattaccgcacttttcacccaacaaataacgggccagcgtcgtgatgacgacgccttcttttttgataaacgttcgacgcataataaattttcagtaaattgaatatttatatcttcaggaatttgaagataaggcgcaacagcgagatgtggaaacggcgaggcacttcacattttttcggattattgcaaatgaggataaaaaaaccgggtttccccggtttcagagtgatgataaaagcaaaattgcctgatgcgctacgcttatcaggcctacatttccttgcaatatgtgcattactttgtaggccggataaggcgttcacgccgcatccggcatgaacaaagcgcaatttgccagcaatagtgaattacggcttcgccacaaaaccaatcgcttcgtacaccgcttttagcgtacgggaagcgtgcgcgctggctttttccgcgccatctttcatcacctgttgcaggaaggcttcatcgttgcggaaacggtgatagcgttcctgcaattcagtcagcataccggaaacggcatcagccacttcacctttcagatgaccatacatcttgccttcgaactgtttttccagttctgggatgctctggcccgttaccgcactaaggatatccaacaggttggaaacgcccgctttgttctgcacatcgtagcgaactaccggcggctcgtcggagtcagtgaccgcacgtttgattttcttcactacgcttttcgggtcttccagcaggccgataacgttattgcgattatcgtcagacttggacatcttcttggtcggctccagcaggctcattacgcgcgcgccagatttcggaataaacggctccggcaccttaaagatctcgccatacagcgcgttgaaacgctgggcaatatcgcggctcagttcgaggtgctgtttctggtcttcacccaccggtaccagattagtttgatacagcaggatgtccgctgccatcagcaccggatagtcaaacagaccagcgttgatgttctcggcataacgcgcagatttatctttaaactgcgtcatgcgactcagttcgccgaagtaggtatagcagttcagtgcccagcctaactgtgcatgttccggcacgtgggactgaacaaaaatggtgcttttctcaggatcgataccacaagccagatacaaggccagcgtatccagcgtcgctttacgcagcttctgtgcatcctggcgcacggtgatcgcgtgttggtcaacgatacagtaaatgcaatggtagtcatcctgcatgtttacccactgacgcagcgcacccatgtagttaccaatggtcaattcaccactgggctgtgcgccactaaaaacgatgggcttagtcatttttgctttcctgattttcgctatgcggaagccctaatgcgggcagaaggtcatttatagactgataaattacatcaggctggctgagatcgatagcctcgccgtagttatatccgtaggttaagccaacacttgggcaacctgccgcttttgccgcctgaatatcattgcgactgtcgccgacaaacagcatctgttgtggggcaattcccatccgctcagccaccagtaacagcgggtccggatgcggttttttgttttgcacatcatcaccaccaatcaccacgctgaagtatttggcgatatctaaggcttcgagcagcggcgcgacgaacggcgtcggtttgttggtgaccaggcctagcggcaggcctttagcctgcaacgcgcccaacgtatcggcaacgtgcgggaacaaaaacgtcccctcttcggcaacctcgccatagtagcgatcgaacagtttacgcagaatacgtacctgttcttctgccggaatgtcgtcatcaacgggcggtttacccattgttttacgctgagtcgcacgttcctgacgcgcccaggtcaatgcgcgctccatcagaacatctgcgccgttaccaatccaggtaataacgcgttcttcacctgcgacgggcaactccagcgcatacagcgccatatctaccgcagcagcaagaccaggagcactgtcgaccagcgtaccatcaagatcaaaagcgacgccgcgaatatcttcaaacttattcatgacttacctttgccagttcactgcgcatttcatcaatgacttttttgtagtctggctggtcgaagattgcgctaccggcgacgaacatatccgcgcccgccgcagcgatttcgccaatgttgttcaccttcacgccaccgtccacttctagtcgaatgtcaaagccagactcgtcgatacggcgacgtacttcgcgcagtttatccagtgtttgaggaatgaaagactgaccgccgaaaccagggttgacggacatcagcaggatcacatccagcttatccatcacgtaatccagatagctcagaggtgtcgccgggttaaataccagacccgctttacagccattttctttaatcagttgcagcgtgcggtcaacatgctcggaggcttctggatgaaaggtaatgatgctggcaccagcggcagcgaaatcaggcacaatgcgatcgacgggtttcaccatcaggtgtacgtcgataggggcggtaatgccatagttacgcaaggatttcagcaccattggcccaatcgtcagattgggaacatagtggttatccatgacgtcaaaatgcacgacatcagcgccagctgccagggcttttgcggtatcttcacccaggcgggcaaaatcagcgctcagaatactgggggcaatcaaatactgtttcatccgcttctccttgagaattattttttcgcgggactaacgactcctggtttgtacaaagccagcagttcgtccacctttttacgtgtgccgccgttgctgcttatactgcgtcgaactttgacgacatgcaattttgcgcgctgataccactcacgcgttaacatcgtatcgtgattggagatcagcactggaatatggcgctcaaccagaccttcggcgatctccgccagatgcgcttgttgttcaagcgtaaaactgtttgtgtgatacgccgtaaagttggcggtcgcagacagcggtgcataaggcggatcgcaatagacgacggatgcatcatctgcgcgcgccatgctatcggcgtaagactcacaatagaaaaaggcattctgcgctttttcagcgaagtgatacaactctgcttccgggaaatagggttttttgtagcggccgaacggcacgttaaactcaccgcgcagattgtaacgacacaggccgttgtaaccgtagcggttcaaatataaaaacagtaccgcccgacggaacggatcctggcttttgttgaactcttcgcggaactgatagtaaacctcggcgcaatttgtttcgggaacaaacagctcgcgtgcggcctgtacgtactcatcagtacgcatcttcacaatgttatagagactgatcaggtcgctattgatatcggcaaggatataacgagaaaagtcggtgttgagaaacacgctcccggcacctacaaaaggctcaaccagacattcgcccttgggcaaatgccgtttaatatcatcaagcaggggatacttgccccctgcccacttcaaaaaagcgcgatttttcttcatgctgactaactaattacaccttctccggctgtggagaaagctccgacagcatccagcgcttcaggcaactcccgcaacgataaaccattgcgggagataaccttgattacttcagatcggcctgtacctgacgcagcggtttcgcccacgggtttttggcctggacatctgctggcaatgtagataccgcttttttcgcctcttctttgctagcgtacacgccagaaaccaggacataccacggctgaccattacgcgtcgtttcatagacaacgtagtttttcagattctctttcttcgcccaaccgttcaggttgtcgtagttagaggaactgctcagctgcagagtgtaatggctggacggtgcgcttttcaagctaccaacattacctgcggtcttcgccccagcagcgggtgttgctgtggtttgcgccggggatgccgtctgtactggagccgtagtcgccgtctcttttggtgctggcgtagaagtcgcagccggtgccttcgtgctcgccacaggggcagctggttcagtacgcttcggcgtctgtgctaccggcttcggctccgttttcacggttgcttgcggttttttcggttcaatcaccgcctgctgacgagctgggcgcgtagtggacggacgttcagcggtttgcgttttcgccgtgtcacggcttgcattgccattgcgaacaggcgcaaccgttgcgggttcagtcggcaacgtggaattgaccgccacattgttcagctgttgctgattttgtggctgggtcagcgcattgttcaggtcaccctgcacttcaacacgttgttgaccatccgttgccaccggggtttgcccttgagtcggcgtagaagagatcggtggcagagaaacatcctgctgagtattttccgcagacgtggttcccggcgctggctgcacgccattcgcctgatcggtcgcattgccagcaagatcaatactcttctcgccagacgcggtttgatcgctggaagtggtgctgggggcttttagcgcagaaccgataccgatgatcaacagcagtagaaccagaatgccgacgcccatcatcatatactgacgagaagcgggtttactggctgcttttttgcgcttacgcggacgacgctctacgcgctcttcatccacggtttcatcttcggattcgtcaatttcttcttcgatttccggttcctcattgcgctctttttgcgcacgagtcggacggcgatcgtcagtgtcatcaagttcaatatcatcaaaattgatctgcggttcgccacgttcagtacgctcagaacgttcagaagattgacgagaacgaccagtacgacgatcgctgggatcgggtttcagctcgtcttctggtttgaattcatccatttaacaccccactaaaaggttaatgcttaccacgttgcaattaacctgaagctaatagaccgcttgataagcggcctgacctttcttgttgttacgcactttgacaatcggcaatggcgttaagaacaagctcgtggctaacgccgctgcgaacttcactcttaccaattgccaacggaagaattaagcgcatctctcccgcaaggactttcttgtcacgcagcatatgcggtaaatacgcctgcgcggacatttcgcgcggcccattgaccggtaacccagcccgcttgagcagggttataatacgctgcgtttcggcagaactaaactgcccgagacgttcgctcgtccgcgccgccatcaccatacccgcagcgaccgcttcaccatgtaaccaattgccataccccatttcagcttcaatggcatgaccaaaggtgtgtcccagattcagtaaagcacgtaacccggtttcgcgctcgtcggcggcgacaacttctgccttcagttcacaacaacggcgaatacagtacgccattgccggaccgtccagacgcaacaacgcatccagattctcttccagccagttaaaaaacgcaccgtcaagaataatgccgtatttgatgacttctgccagcccgctcgctaactcacgcgggggaagcgttttcagacagtcgagatccaccaccacactagcaggttggtagaacgcgccaatcatgtttttaccgaggggatggttgaccgcagttttgccgccaacggaggaatcgacctggctcagtaacgtcgtcgggacttgaatgaaacggacaccgcgctgataactcgccgccgcgaagccggtcagatcgcccactacgccgccgccaagcgccaccagcgtagtatcgcgaccatgcggtttttgtaacaacgccgtaaagacggtatcgagtacagccaggcttttatactgctcgccgtcagggaggataacgctatcgacgttaacacccgcctgttcaagtacgccgcggaccttatcgagatacagaggagccagggtttcgttggtgaccaacatgacctgctcgccgcttttcagcggtaagaaactagctggttcattaaacaaaccagatgcgatggtaattgggtaactacgttccccgagagtaacgacaatcctctccataacgcgacatccaccttaattactgtacccgcagacgagtgtatataaagccagaattagttgctttccagcatgtgaataatctggtttgcaaccactttagcgctttgatcatcagtacgaatggtcacgtcggcaatctcttcatacagcggattgcgttcattggccaacgcttccagaacttcacgcggcggtgtttcaacgtgcagcaacgggcgttttttatcacgctgcgtgcgtgcaagttgcttttcgatggtcgtttcaagataaacgacaacgccacgagcggaaagacggttacgcgtttcacgggatttcacagagccgccgccagtagccagcacaataccctgtttctcggtcaactcattgatgaccttttcttcgcgatcgcggaagccttcttcgccttctaaatcgaaaacccagcccacatcagctccggttcgtttctcaatctcttgatcggaatcgtaaaattccatattgagttgttgagctaactggcgcccaatagtgctttttccggcacccataggcccaaccagaaagatattgcgtttctctgccattttttcggtactactaagactattcgttaatgataaacccgcttcgctcagagagcgccgcaggacatgaactgaaacctcataagatattgcgagagtcagactgaaaattatctcaatactccagcgggtttggcaactgaataaatcacccatccctctgcatatctggtcgctgcaagcgcgctgccttgctaccaccgctctggcgataaatcaccgggtaagattagcgtaaaaaagacagcaaaatgccgcctgaatgataaatcatcatcatggaacgcaggcagcgaagagcaccaactctcaaatcggtactccttgtatgctaaatacctgcgcgcgtcaaatagatgaaacacgttcagcgtaaaaacattaccgcttttacggctgtttactcactggaaaccagtcgtggcgtgataaacaccactaactcgcgtcgttcatcttcttttccgtcatgacgaaatgattgcccgaaccagggaatgtcgccaagcaacggtacgctatcctgaccgcttttatttttacgggtaaaaatgccgcccagcgccaacgtttctccgcttttgacctcgacctgcgtttcgatctcctgcttatcaatcgccagcacttcgccatcggcctgctgtagcacctgccccggaacgttctggctgatgtgtaatttcagccggatgcgacctttttgtaacaccgtgggcgtgacctccatccccaggacggcctctttaaattccacgctcgtcgcgccactttccccgctggaaacctgatatggaatttcgctcccctgtttaatgctggcaggctgaagatgactggccagcagacgcggactggcgataatatccagctgctgtttttgttcgagcgcggaaagctcaagatccagcaagcgtccgttgatgcgcccaatgttaaaaccgacatgcgttgtcgccgtcgctacggagaggtcgctaccaagcgtggtgacttgcccaacgccaccagcgtgttgcgcatcggccagcgtccatttcacgcctaactcacgcaaacttttttcattaatggtgacaatatgcgcgctcagctcaacctgcccgaccggcagatccatttgcgctacccactgttcaagcgcgcttaacgccgttttgttatctcgtagcaaaaggcgattggtgcgtttatcgacggtcatactccctttggcactcagcagcttctcccccgctttcgccagttctcccgcgtcggcgtattgcagggttatactgcgattttccagcggcagatttgcctgcgcccgcgcctgctccgcctcctggcgggcgatattgttattctgccaggcaatggaatgcacactgagaatgttgccttcctgccgcgttatcagtccggcgcttttcactacagtttgtagtgcctgcttccagggaacatctgttagatgtaagctcaccgtaccgctgacgtctgggctcacgaccaggttcaacttctcctgttcagccagcgcctgcaacacctgagctaccggaacgtcatccaccatcagcgtcactttttgcggctttgccgcctgtacgccgggtatcagcatcaacagtagtgcggctatccattgcttcatttgtatctccttgccgttgccacaaccattgtggcggttcgcagtttgtcccggtacccagcgttagtacgtctggcgtcagctgtaaaattgtccagccgttttccagcacatcgttttgctgcacccgtcgccatttcttttgcccgtcttttattacaccgatgatgcgctcgcctcgccctaccatcccctgatagcgccactggctaagttcgctaatccggcatagatcttccggcggtttaaaagggtcacgcataccggttaaaaggcacaatgcaatacctgccaacaaccagcgtttaaccctcatgcggcgtctccagttgtagcgtgaacaaaagatcatcaccttccacgcttaagctaaaacggctcacgctgacgttgcgctctgccagccgtgtaaatgcgctcggcactgcttcccacagcgttttcaacgccaactcgcctccctgcgcggatggatgccaggaaaccagttgcgcgccggataactgaaaatccagtgggctaaagggcagcgttttttcctcgctgaagggagcggtgtctaccaggcgatacagtgcggcccactgctggtgatgacttgcccgtagtcgaattaatgcgtcgcgctcttcatggtgtgtgctactcagaaaaatgagcgtaactaacatcagcaaccagaatgcccagcaaagctggcggaggcggggacttgtggcgaaccaccagtcaaagaacatgttcatcgctaaccttccttgttaactgatactcaaattgccagcgtccctgcgcatcctgctgcgtggctccccgctgattgagatgaaaagatgcatcctggcggagactcgtttctagtgcgtttaacgcggtaatgcttgttgtcagccccttgatctccagcgttccctgctgccagcttatcgttgtcagccaggcgtgctcgggtaaaagcgccgccagtgcttccagcgcagattgccagtcgcgggtaaattgtcgctggcgctgccgttggctacgctgttcgcgtaactgctgttgctccagcaaacgtggcttcgttatctgtaagctgcgggcgagttgttgttccgcctgaagcaaaactgcgtctatgcgcgcttcggcgctgcctgtcagacgcagtattagcgttatcccgacggccagcagcagaggcgcaacgaacatcagcaaccagaaacgcagaaaagcggtccggcgttgctgtcgccagggcaaaaaattaattggcgggttcatcagtacgccttcccaagcgccagccccagcgcgatggcaaagtctccacctggcggcggtagcggcggctgacgaacagaaacggcctcccagggatcaaatccgccttcgccacatatcgcgacgctttcgggatcaacggataacgctgccgccagctccttcgcgctagtcatccccaccgccagtttgcgcccccagctatagcgcgtcgcccacagccactgttcgttatcacgccaggccagacattgctgatgagaaggtaaaaaaggcaggaatcgctgtaatgcactggcatccggggtgatcgcgctcacatgaacacgcaacctttctgccagagtaagcagcgttgccagctctttgctttgcgcggcagtcacgttataggcgggactgagactgtcttcgctgtaatcgaagcgcagggagtccggatccatatccagctcgcgggccatcgtcccactcagccaggccgtttgctcccgctcaccaagggacatgctcgggcgcggaaaactccgctgtaatgtgcgactggcgggaaacgccaacataatgtgatgacgctgcggcagttcgcgactccacggtaacaacgttttagccagctgctgcgcatcaacaatccgcccatctttgataatgtcgttctccagcggcaaccgccaccagcgttgcaaaaagcattcttttgcgccccgcacgatcgcaaccgctaccgcttcttgctgttgtaaatgcaaaccaatttgccagatcttaaatgccattgtgatgatctccttatcacccgtcactctgacgggtatatcaatgcgtctggcttgcctttatactaccgcgcgtttgtttataaactgcccaaatgaaactaaatgggaaatttccagtgaagttcgtaaagtattttttgatccttgcagtctgttgcattctgctgggagcaggcagcatttatggcctataccgctacatcgagccacaactgccggatgtggcgacattaaaagatgttcgcctgcaaattccgatgcagatttacagcgccgatggcgagctgattgctcaatacggtgagaaacgtcgtattccggttacgttggatcaaatcccaccggagatggtgaaagcctttatcgcgacagaagacagccgcttctacgagcatcacggcgttgacccggtggggatcttccgtgcagcaagcgtggcgctgttctccggtcacgcgagtcaaggggcaagtaccattacccagcagctggcgagaaacttcttcctcagtccagaacgcacgctgatgcgtaagattaaggaagtcttcctcgcgattcgcattgaacagctgctgacgaaagacgagatcctcgagctttatctgaacaagatttaccttggttaccgcgcctatggtgtcggtgctgcggcacaagtctatttcggaaaaacggtcgaccaactgacgctgaacgaaatggcggtgatagccgggctgccgaaagcgccttccaccttcaacccgctctacagcatggatcgtgccgtcgcgcggcgtaacgtcgtgctgagccggatgctggatgaagggtatatcacccaacaacagttcgatcagacacgcactgaggcgattaacgctaactatcacgcgccggagattgctttctctgcgccgtacctgagcgaaatggtgcgccaggagatgtataaccgttatggcgaaagtgcctatgaagacggttatcgcatttacaccaccatcacccgcaaagtgcagcaggccgcgcagcaggcggtacgtaataacgtgctggactacgacatgcgccacggctatcgcggcccggcaaatgtgctgtggaaagtgggcgagagcgcgtgggataacaacaagattaccgatacgctgaaggcgctgccaacctatggtccgctgctgcctgccgcagtcaccagcgccaatcctcagcaagcgacggcgatgctggcggacgggagcaccgtcgcattgagtatggaaggcgttcgctgggcgcgtccttaccgtagcgatactcagcaaggaccgacgccgcgtaaagtgaccgatgttctgcaaacgggtcagcaaatctgggttcgtcaggttggcgatgcatggtggctggcacaagtgccggaagtgaacagcgcgctggtgagcatcaatccgcaaaacggtgccgttatggcgctggtcggtggctttgatttcaatcagagcaagtttaaccgcgccacccaggcactgcgtcaggtgggttccaacatcaaaccgttcctctacaccgcggcgatggataaaggtctgacgctggcaagtatgttgaacgatgtgccaatttctcgctgggatgcaagtgccggttctgactggcagccgaagaacagtccaccgcagtatgctggtccaattcgcttacgtcaggggctgggtcagagcaaaaacgtggtgatggtacgcgcaatgcgggcgatgggcgtcgactacgctgcagaatatctgcaacgcttcggcttcccggcacaaaacattgtccacaccgaaagcctggcgctgggtagtgcgtccttcaccccaatgcaggtggcgcgcggctacgcggtcatggcgaacggcggcttcctggtggacccgtggtttatcagcaaaattgaaaacgatcagggcggcgtgattttcgaagcgaaaccgaaagtagcctgcccggaatgcgatattccggtgatttacggtgatacgcagaaaagcaacgtgctggaaaataacgatgttgaagatgtcgctatctcccgcgagcagcagaatgtttctgtaccaatgccgcagctggagcaggcaaatcaggcgttagtggcgaagactggcgcgcaggagtacgcaccgcacgtcatcaacactccgctggcattcctgattaagagtgctttgaacaccaatatctttggtgagccaggctggcagggtactggctggcgtgcaggtcgtgatttgcagcgtcgcgatatcggcgggaaaaccgggaccactaacagtagcaaagatgcgtggttcagcggttacggtccgggcgttgtgaccagcgtctggattggctttgatgatcaccgtcgtaatctcggtcatacaacggcttccggagcgattaaagatcagatcagtggttacgaaggcggtgccaagagtgcccagcctgcatgggacgcttatatgaaagccgttcttgaaggtgtgccggagcagccgctgacgccgccaccgggtattgtgacggtgaatatcgatcgcagcaccgggcagttagctaatggtggcaacagccgcgaagagtatttcatcgaaggtacgcagccgacacaacaggcagtgcacgaggtgggaacgaccattatcgataatggcgaggcacaggaattgttctgattaaaaaggcgcttcggcgccttttcagtttgctgacaaagtgcacttgtttatgccggatacggcgtgaacgcgttatccggctaacaaaatcgtgaaaactcaataaattgcagaaaccccataagcctgataaacattgtgcatcaggcaaacttcacgcatttacactcgcccctgccctttcaaccattcgcgcacgaggaacagcgcactgacattgcgcgcttcattgaagtcagggtcttccagccaatccatcatatgcgccagcggccagcgcacctgtggtagcggctctggctcatcgccttccagactttccgggtagagatcttgcgctaccacgatattcattttgctggaaaagtaagacggtgccatgctgagcttcttcaaaaaagtcagatcgttcgctccaaatccaacctcttcttttagctcgcggttagcggcttcgtagacgctttcacccggatcaattaatcctttgctaaaacctaattcgtaggattcagttcccactgcgtattcgcggatcaggatcaggtgatcgtccacaatcggcacaatcatcactgcttcccggttggttggacgcattcgttcataaacacgccgcacgccattgctgaactccagatccacgctctcgacggtaaacagtcgggaacgggctacagtttcaacattcagaatggtgggtttttgtaaacttttgctcatcgtgggatctatgctgtgaaatcagcggttattgtgcgatatcggacacgctttcggcaatgtgaattgcatgttatttacatttatgtaacttaataaataatcgtcctcaaatcaaattaaaagtcaataggttgaaataactccaggaatttgctgatattccgccttcagagggtttgctatgatcagcggttactgtgatgtgcttaatgatgctcaagttaaactccacgcttgccgatagccaaccgcagaatcatgtattgtgtccggtgcgactgaccacgcctgacagactaagtaagatggggaaagcatgagcaccattgtgatttttttagctgctttgctggcctgcagtctacttgcgggatggctgataaaagtgcgatccagacggcgtcagctgccctggaccaacgccttcgcggatgcgcaaacgcgtaaactcacacctgaagaacgtagcgccgttgaaaattatcttgagagcctgacgcaggtattacaggtgcctggcccaacgggagccagcgcggcaccgatctctctggcgctgaatgccgaaagcaacaacgtcatgatgctgacacacgctatcacgcgttacggcatctctaccgacgatccgaataaatggcgttactacctcgatagcgtagaagtccacctgccccctttctgggaacagtacatcaacgatgagaataccgttgaactgattcataccgatagcctgccgctggttattagtctcaacggtcatacgctgcaggagtacatgcaggaaactcgcagctatgccttgcaacctgttccgagtacgcaggcgagcattcgcggggaagagagtgagcaaatcgagctactcaatattcgcaaagaaacgcatgaagaatatgcgctgagtcgtccgcgcgggctgcgtgaagcgttgctgatcgtcgcctccttcctgatgttctttttctgcctgattaccccggatgtatttgttccgtggctggcaggcggcgcgttactgctgctgggcgcaggtctgtgggggctattcgcgcccccggcaaaatcctccctgcgggaaattcattgtctgcgcggtacaccccgtcgttggggattgtttggcgaaaacgatcaggaacagatcaacaatattagtctcggtattatcgacctggtctatcccgcacactggcagccatacattgctcaggatctcggtcaacaaaccgatatcgatatctatctcgaccgccatgtagtgcgtcagggacgatatcttagcctgcatgatgaagtaaaaaactttccgttacagcactggctgcgcagtacgattatcgctgcgggcagcctgctggtgctgtttatgctgttattctggatcccgctggatatgccgctgaaattcactctcagttggatgaaaggcgcgcagaccattgaagccaccagcgtaaaacaactggctgacgctggcgtgcgggtaggcgatacattgcgtattagcggtacgggaatgtgtaatattcgaacttccggaacctggagcgcgaaaaccaatagtccttttttaccgtttgactgcagccagatcatctggaacgacgcccgcagtttgccattaccagaatctgaactggtcaacaaagcgacggcattgactgaagcagttaatcgccagctgcaccctaaaccggaagatgaatctcgcgtcagtgccagtttacgtagtgcaattcaaaaatccggcatggtattgcttgatgattttggcgacattgtactgaagacagcggatttatgttctgccaaagatgactgtgtgcgactgaaaaatgcgctggtcaatctcggcaacagtaaagactgggacgcgctggtaaaacgcgccaacgccgggaagctcgatggcgtgaatgtgttattacgcccggtgagtgcggaaagcctggataacctggtggcaacctccaccgcgccgtttatcacgcatgaaacggcgcgagcggcacaaagtctaaacagtccggcccccggcggattcctgattgtcagcgacgaaggcagcgattttgttgatcagccctggcctagcgcaagtctttacgactacccgccgcaagaacagtggaacgctttccagaaactggcacaaatgctgatgcatacgccgtttaacgccgagggtatcgtcacaaaaatcttcactgacgccaatggtacgcagcatattggccttcatccgatcccggatcgttccggcctgtggcgctatctcagcaccacattgctgctactgacgatgctgggtagcgccatttacaatggcgtacaggcctggcgtcgttaccagcgtcatcgcactcgcatgatggagattcaggcctattatgaaagctgcctgaacccgcaactgatcacccctagtgaaagccttatcgaataacacgtttgcgcggcaggttatgctaccctgtcgcgcaaattgcttcactctggagatttccctcatgcatatcaacattgcctggcaggacgtagataccgttctgctggatatggacggcacgttgctcgacctcgccttcgataactatttctggcaaaagctggtgcctgaaacatggggcgcgaaaaacggggttacgccacaggaagcgatggaatatatgcgccagcaatatcacgacgtacagcatacgctaaactggtactgtcttgattactggagtgagcaactgggtctggatatctgtgcgatgaccaccgagatgggaccgcgtgccgtactgcgtgaagataccattccgtttcttgaggcactgaaagccagcggtaagcagcgaattttgctcaccaatgcgcatccgcacaacctggcggtaaaacttgagcataccggtctggacgcacaccttgatttattactttccacccacacatttggttatccgaaagaggatcagcggttatggcatgcggtggccgaagctacgggtctgaaagctgaaagaacgctgtttattgatgacagcgaagcgattctcgatgctgccgcgcaatttggtattcgttactgcctcggcgtgactaatcctgattccgggattgccgagaaacagtatcaacgccatccgagtctgaatgactaccgccgcctgatccccagcctaatgtgaaggagacgccatgaaagagaaacctgctgttgaggttcgactggataaatggctatgggctgcccgtttttataaaacccgcgcgctggcccgtgaaatgattgaaggcggtaaggtgcattacaacgggcagcgcagcaagccgagcaaaatcgtcgagctgaatgccacgctcactctgcgccagggaaatgacgaacgcacggtgattgtaaaggcgattactgaacagcgtcgccccgccagcgaggcagccttgctgtatgaagagactgcggaaagtgtagagaaacgcgaaaaaatggcgctggcacgtaaacttaatgccttaaccatgccgcacccggaccgacgcccggacaaaaaagagcgccgcgacctgttacgatttaaacacggcgacagtgaataactgtcacctgcaagagagatgattatgccgcaacatgaccaattacatcgctatctgtttgaaaactttgccgtgcgcggcgaactggtaaccgttagcgaaaccctgcaacagatccttgagaaccacgattatccgcagcccgttaaaaacgtgctggcagaactgctggttgcgaccagcctgttaaccgctacgctgaagtttgatggtgatatcaccgtacagctgcagggcgacggtccgatgaatctggcggttattaacggtaacaataaccagcagatgcgcggtgtggcgcgcgtgcagggcgaaattccagaaaatgccgacctgaaaacgctggtcggcaatggttacgtggtgatcaccattaccccgagcgaaggcgaacgctatcagggcgtagttggtctggaaggtgataccctggcggcctgcctggaagattactttatgcgttctgaacagctgccgacgcgcctgtttattcgcaccggcgacgtagacggcaaaccggctgcaggcggtatgttgttgcaggtaatgcctgcgcaaaatgcccagcaggacgactttgaccacctggcgacgctaaccgaaaccatcaaaaccgaagaactgctgaccttaccggcaaacgaagtgttgtggcgtttgtatcacgaagaagaggtgacggtttacgatccgcaggatgtggagttcaaatgcacctgcagccgtgaacgttgcgccgatgcgctgaaaacgctgcctgatgaagaagttgatagcatcctggcggaagatggcgaaattgacatgcattgtgattactgcggtaaccactatctgttcaatgcgatggatattgctgaaatccgcaacaacgcgtctccggcagatccgcaagttcattaatgagtatgtccggcagagagggctctgccggattttacgactaatacacctgatgcgctttgtcactcattcagattcacattcagcctttcaccatccactacaagatcgcgccacgctttaggcttcgtccccagttttccatccttcgcagctgtgagtaatttttctttcgttatttcgttcggaagtaaactcatatcaagcgcgtcccattcttttctgtcactgtcaaagccatagacaatgactctgtcatcattaaaagcaaacaggatccgctccgcctgaccatcactattcagatcttgctcgaccaggacgcaggcgtctttttcaatacaggtcatcacgttatagcgatcctggattaaggcgctccagaatgtcgcatcaggtttaacagaaccaggggcaattaacacattatcggctaatactttttcgcttacctgttgctgaagatgttgctctccatctaacgccatcagcagatcccgcgcgcgtttcgggtctttcataaacccggcatcgcttttcaggctctcaagcgcagcacgtccatagcgaccgctctgctcgagcatgtagatagttacctggtcactcgtgtttttgccgctctgataacgcgccatatggctgttcacgctaatgcgcatactgtccagcaccgggctattaagaagcaccagtatcaccaacaccaataagctaaccgcaaggttcactttgccctgaagaacaacgggattttgccctttacgccagacgatgctgacaaaataccccaggctccacaccagtaacaccagcaccgccagcacgccctgcaagcggtcgacagtccagccgtactgagcgacccgcagccataacgcccaggcggcgacgaacacatacagcggagcaaccagcaaagcggttttaatcaggcaacgcaacggccctgtccagggaagactcgctttttgcggatcgcggacaatagccattaagatcaattgcaaaaaggccagcgtcaacagcaacccggcggcggagatgtggcgagaaatcgcgctcaggcccgtaaacggcagggtgatgataaacatcagggttagcaaacttactaacggcagcaaccccgtggcgattaacgtgaacaacttttgaatagagtcgattaaacgactctgtgttcgcgcgaggatcaccgccagcgcggtaaccagacctaacgtgagataaataaaccagtcggttgcaaaaaagagcgtattgaaaaacgtgatgccaacaagtttaaacaactcactccacagtaaaagcaccagccacgtcaagccattggcgagaaaaatcaccagtaatataagtacgttatgccatacactctggtaaaaatagcgatagcggctactgtcattgcggatgcgaaggctttgttgtatccacggtagcaacaacattgccatcaacagcagatagcaaccaaaatcccaaagcgccttttcagctctccaggggttcatgccatcagtttgccacttcagccagccgctcatccccagcgtggcaataaacactagcgccagccatccccaaaggcgcttctgtttaaaagagatcacggagaagagtaaaacggaactaaacgcgacggtcgcaggcacgccataaacaatccaactgtgattttttccggaaagccaggcgatcagcaggtagcaaaccagaccctgaagtaatccggtagcaatcatcccccagcgtgttgcgggactaagttcaacgttatccatgttggttatccagaatcaaaaggtgggttaattatcgcatccgggcagtagtattttgcttttttcagaaaataatcaaaaaaagttagcgtggtgaatcgatactttaccggttgaatttgcatcaatttcattcaggaatgcgattccactcacaatattcccgccatataaaccaagatttaaccttttgagaacattttccacacctaaaatgctatttctgcgataatagcaaccgtttcgtgacaggaatcacggagttttttgtcaaatatgaatttctccagatacgtaaatctatgagccttgtcgcggttaacacccccaaaaagactttactattcaggcaatacatattggctaaggagcagtgaaatgcgcgttaacaatggtttgaccccgcaagaactcgaggcttatggtatcagtgacgtacatgatatcgtttacaacccaagctacgacctgctgtatcaggaagagctcgatccgagcctgacaggttatgagcgcggggtgttaactaatctgggtgccgttgccgtcgataccgggatcttcaccggtcgtagtccaaaagataagtatatcgtccgtgacgataccactcgcgatactttctggtgggcagacaaaggcaaaggtaagaacgacaacaaacctctctctccggaaacctggcagcatctgaaaggcctggtgaccaggcagctttccggcaaacgtctgttcgttgtcgacgctttctgtggtgcgaacccggatactcgtctttccgtccgtttcatcaccgaagtggcctggcaggcgcattttgtcaaaaacatgtttattcgcccgagcgatgaagaactggcaggtttcaaaccagactttatcgttatgaacggcgcgaagtgcactaacccgcagtggaaagaacagggtctcaactccgaaaacttcgtggcgtttaacctgaccgagcgcatgcagctgattggcggcacctggtacggcggcgaaatgaagaaagggatgttcagcatgatgaactacctgctgccgctgaaaggtatcgcttctatgcactgctccgccaacgttggtgagaaaggcgatgttgcggtgttcttcggcctttccggcaccggtaaaaccaccctttccaccgacccgaaacgtcgcctgattggcgatgacgaacacggctgggacgatgacggcgtgtttaacttcgaaggcggctgctacgcaaaaactatcaagctgagcaaagaagcggaacctgaaatctacaacgctatccgtcgtgatgcgttgctggaaaacgtcaccgtgcgtgaagatggcactatcgactttgatgatggtagtaaaaccgagaacacccgcgtttcttatccgatctatcacatcgataacattgttaagccggtttccaaagcgggccacgcgactaaggttatcttcctgactgctgatgctttcggcgtgttgccgccggtttctcgcctgactgccgatcaaacccagtatcacttcctctctggcttcaccgccaaactggccggtactgagcgtggcatcaccgaaccgacgccaaccttctccgcttgcttcggcgcggcattcctgagcctgcacccgactcagtacgcagaagtgctggtgaaacgtatgcaggcggcgggcgcgcaggcttatctggttaacactggctggaacggcactggcaaacgtatcagcattaaagatacccgcgccattatcgacgccatcctcaacggtagcctggataatgcagaaaccttcactctgccgatgtttaacctggcgatcccaaccgaactgccgggcgtagacacgaagattctcgatccgcgtaacacctacgcttctccggaacagtggcaggaaaaagccgaaaccctggcgaaactgtttatcgacaacttcgataaatacaccgacacccctgcgggtgccgcgctggtagcggctggtccgaaactgtaatgatttgaagctggagaatatctatccagtatcttatagaaagcaaaacgggaggcaccttcgcctcccgtttatttacccttcttttgtcgtgccctgcgcccgcgttaccggcactggcagccaggcgcgaatggaaagcccgccccgctcgctggtgccaagctccagcatcccgttatggttatccacgatacgctgcacaattgccagccctaatcccgtgccgctaatggtgcgcgcactgtcgccgcggacaaacggctggaacaggtgcttacgttgttccggcgcaattcccggaccgtcatcttccacctggaaccaggcgcgattcggctccgttccgctgctgactttgatccagccattgccataacgggcggcgttgaccaccatattcgccaccgcgcgtttgatgctcagcgggtgcattttcacttcaatgctgccggggtaaagcgcggtttcaatttcccgctcatagccactttcggcagcaatcacctcaccgagtactgcattaagatccgccatttccatcggcatctcctgcccggtgcgcaggtagtcgataaactgctcaatgatggcgttgcactcttcgatatctttattgatgctttctgccagatagccatcctgctcgctcatcatctcagtcgccaggcgaatacgcgtcagcggcgtgcgcaagtcgtgacttacccccgccatcagcagcgtgcggtcatccgccagttgcttaacaccagccgccatatggttaaaggcacgggtaacggaacgcacctcgctagcgccatactcacgcagcggcggcggaataatccctttaccaacctgcaaggctgcgtgttcgagatcgaccaacggtcggttctggatacgaataaacagccacgccccgcctatcgccaatagcataatcgccagcgtatagcggaacagcggagagaaatcgccctgatgaatttcggtcagcggcacgcgtacccagatattggggctcagccaggttttcagccagacgacagggctacttttgttgacctcaacgcgcacttccgtcgggccgcccagttgctgcgccatctgatggcttaagaattcatagtgttgcgcccaacgcagacctgcctcttcggcagcctcgttggagtagagagagatccccagctcacggtagatctcccgacggaaagcgggaggcacaaccaactgcgtgccgtcctccagttgcagtttgtcggtcatcaacatacgcacttcgtacgcgaggactttattaaactgctggaggctcggcaaaatcgcgaagttcagcaccaccagataagtcgtcaccaggctggcgaacagcaaggtgacgatgagcaataacgtacgggcaaaactacttcgtgggctgaagcgcaatcgcctcatgctttagagccgtccggtacaaagacgtagcccagaccccagacggtctgaatgtaacgcggatgcgctggatcttcttccaccatgcggcgcagacggctaatctgcacgtcgatggagcgttccattgcggaatattcacgaccacgggcaaggttcatcagcttatcgcgggagagcggctcacgcggatggctgaccagtgccttcagtaccgcaaactcaccgctggtgagcggcatcggctcgtcttcgcggaacatttcgcgcgtaccgaggttaagtttgaacttaccgaaagcaattaccgcctcttcctgactcggtgcgcctggcagttcgttcgcctgacgacgcagcaccgcacggatacgggccagcagttcacgcgggttaaacggttttggaatgtagtcgtcagcgccaatctccaggcctacgatacggtccacttcttcccctttcgccgtcaccataatgatcggcatcgggttgctctgactacgaagacgtcggcaaatgctcaagccatcttcaccaggtaacattaaatccagtaccataagatggaaagattcacgagtcagcaggcgatccatctgttctgcattagcgacgcttcgaacctggaagccttgttcggtgagataacgttccagcagcgcacgcaggcgcatgtcgtcatcgaccaccagaatcttgtagttctcttgcattgtttgtactcccaaaggttcgcaacaatttgtaagcgtgtattcttaaaaaagctcacgttcgtcaccagctaaatctggtatgaatttcagcctaaattgttacaaagcatattaaacagcagcttaagtatacaatttattcggcgaaacattattgattctgttgatatgatcacgttatacccaatgtgcgcattatcaaacagacaaagggaatcaacgagatgaaaacgcccctggttacccgggaagggtatgaaaaactcaaacaagagcttaattatctctggcgtgaagaacgcccggaggtcacaaaaaaggtgacctgggccgcaagtctgggcgaccgcagcgaaaatgctgactatcagtataataaaaagcgtctgcgtgaaatcgaccgtcgcgtgcgctatctcactaaatgcctggaaaatctcaaaatcgtcgattactcccctcagcaggaaggcaaagtcttttttggcgcgtgggtggagattgaaaacgacgatggcgtgactcaccgtttccgtattgtcggctacgatgaaatttttggccgtaaagattacatctctatcgattccccgatggcccgcgcattgctgaaaaaagaagtcggcgatctggcggtggtgaatacccctgccggggaagcgagctggtatgttaatgctatcgagtacgtgaaaccgtaaggaagagtcttaacctcctgccgatggctggcatttttgccagccagtccgtataactatcccctgatttttgatccgaaaagatgaactcaaaccatgatgaatgatagcttctgccgcattattgcgggtgaaattcaggcgcgcccggaacaggttgacgctgccgttcgcctgcttgacgaagggaataccgtgccgtttatcgcacgttatcgtaaggaaatcaccggcggtctggatgacacgcagctgcgtaatctggaaacgcgtctgagctatctgcgcgagctggaagagagacgtcaggcgatcctcaagtccatttccgagcaaggcaaactcaccgatgatctggcgaaggccatcaacgccaccctaagcaaaaccgaactcgaagacctctacctgccctacaaacctaaacgccgcacccgcgggcaaatcgccattgaagcagggcttgagccgttggctgacctgctgtggagcgatccgagtcacacgccagaagtcgccgctgcacaatatgtttatgccgataaaggcgtggcagataccaaagccgcgctggatggcgcgcgctatatcctgatggaacggtttgccgaagatgccgcgctgctggcgaaagtgcgtgattatctgtggaagaacgcgcatttggtttctacggtggtgagcggtaaagaagaggaaggggcgaaattccgcgactatttcgatcatcacgaaccgttgtccacggtgccttctcaccgcgcgctggcgatgttccgtgggcgtaacgaaggcgtacttcagcttagcctgaatgccgatccacagttcgatgagccgcccaaagagagctattgcgagcaaatcatcatggatcaccttggcctgcgcctgaacaatgccccggcggatagctggcgcaaaggcgtggtgagctggacgtggcgcatcaaggtgctgatgcatctggaaaccgaactgatgggcaccgtgcgcgaacgtgcggaagatgaagcaatcaacgtctttgcccgtaacctgcacgatctgctgatggcggcccctgccggactgcgtgcaacgatgggcctcgatccgggtctgcgtactggggtaaaagtggcggtggtcgatgccactggcaaactggtggcgaccgacaccatttacccgcacaccggacaggccgcaaaagcagcgatgaccgttgctgcgctgtgtgaaaaacataacgttgaactggtagcgatcggtaacggtacagcttcccgcgaaactgagcgtttctatctcgatgtgcagaagcagttcccgaaagtgaccgcgcagaaagtaatcgtcagcgaagcaggcgcgagcgtttacagcgcttccgagctggctgcacaggagttcccggatctcgacgttagcctgcgtggcgcggtgtctatcgcccgccgtttgcaggatccgctggcggagctggtgaaaatcgatccgaaatctatcggcgtaggtcagtatcagcatgacgtcagccagacgcaactggcccgcaaactggacgcagtagtagaagactgcgtaaacgccgttggcgtcgatctcaacactgcttctgttccgctgttaacccgcgtggcgggcctgacgcgcatgatggcgcaaaacatcgttgcctggcgcgatgagaacggtcagttccagaaccgtcagcaactgttaaaagtgagccgtctggggccgaaagccttcgagcagtgcgcgggcttcttgcgcattaaccacggtgataacccgctggacgcgtctaccgttcacccggaagcctatccggtggtggaacgcattctggcagcaacacagcaggcactgaaagatctgatgggtaacagcagcgaactgcgtaacctgaaagcgtctgactttactgatgagaaattcggtgtgccgacggtaaccgacatcatcaaagagctggaaaaaccgggtcgcgatccgcgtccggaatttaaaaccgctcagtttgccgatggcgtcgagacaatgaacgacctgcaaccgggtatgatcctcgaaggcgcagtgaccaacgtcaccaactttggcgcgtttgtcgatattggcgtgcatcaggacggcctggttcacatctctagtttgagcaacaagtttgtggaagatccgcataccgtggtgaaagcgggcgacattgtgaaggtgaaagtgctggaagtggatcttcagcgtaaacgtatcgccctgactatgcgcctggatgagcagcctggcgaaaccaacgctcgtcgcggcggcggtaatgaacgcccgcaaaacaaccgcccggcagccaaaccacgcggtcgtgaagcgcagcctgccggtaatagcgcgatgatggatgcgctggcggcggcaatgggcaaaaaacgttaaacgcccgtactggcctacggttcgaatttgcacgaaatcgtagggcagataaggcgttcacgccgcatctggcaacgaacgccttgcctgacataaaagtgccggagaatatctccggcatttttattccacagccaaactcataatatattccggcaatatttatcatttcattaacaactgaaaccttaattaaacattagccagtccgggtaattcactattcgaattatattttcgctgcgatataaccttgagccacatcaacattgagtcagattattattcaaaccaacattcgcacacattttaagtattgctgatagaaaccattctcattatcattgtgttgttgattatttaatctctcctttgttggcaaatcatctggtctcatgtcgctgtcaaacgccccatgaggtagttatccagttaatgagaaacaagtaggcacctatgcaatacactccagatactgcgtggaaaatcactggcttttcccgtgaaatcagcccggcatatcgccaaaaactgctttctcttggcatgttacctggctcctcttttaatgtggtgcgcgtcgctccactcggcgaccccattcatatcgaaacccgtcgtgtgagcctggtattacgcaaaaaagatctggccttattagaagtggaagcggtttcctgttaatacggtgataacaacaatgaaaaaattaaccattggcttaattggtaatccaaattctggcaagacaacgttatttaaccagctcactggcagtcgtcagcgtgtaggtaactgggctggcgttaccgtcgaacgtaaagaagggcaattctccaccaccgatcatcaggtcacgctggtggacctgcccggcacctattctctgaccaccatcagtagccagaccagcctcgatgagcaaatcgcctgtcactacattttgagtggcgacgccgacctgctgattaacgtggtggatgcgtctaaccttgagcgtaacctgtacctgacgctacaactgctggaactcggcattccctgcattgtggcactgaacatgctcgacattgccgagaagcaaaatattcgtattgaaattgatgctctgagcgcgcgtctgggctgtccggtgatcccgctggttagtacccgtggtcgcggtattgaagcgctcaagctggcgattgatcgctataaagctaacgagaatgtggaactggtgcattacgcacagccgctgctcaacgaagcagatagtctggcaaaagtgatgccttccgacatcccgctgaaacaacgtcgctggctgggcctgcaaatgctggaaggcgatatctacagccgcgcctacgccggtgaagcgagccagcatctggatgccgccctcgcccgtctgcgtaatgagatggacgatccggcgctgcacattgccgatgcgcgttaccagtgcattgctgccatctgtgatgtggtaagcaacaccctgacggcagaacccagccgtttcaccactgcggtagataaaatcgtgctcaaccgtttcctcggtctgccgattttcctctttgtgatgtacctgatgttcctgctggctatcaacatcggcggggcgttacagccgctgtttgacgtcggctccgtggcgctatttgtgcatggtattcaatggattggctacacgctccacttcccggactggctgactatcttcctcgcccagggcctgggtggcggcattaacaccgtgctgccactggtgccgcagattggcatgatgtacctgttcctctccttccttgaggactccgggtatatggcgcgtgcggcgtttgtgatggaccgtctgatgcaggcgctgggcttgccggggaaatcctttgtgccgctgatcgtcggtttcggttgtaacgtaccgagcgtaatgggtgcacgtacgcttgatgcaccgcgtgaacgtctgatgaccatcatgatggcaccgtttatgtcctgcggcgcgcgtctggctatcttcgcagtattcgcggctgccttcttcgggcagaacggtgcgctggcggtcttcagcctgtatatgctgggtattgtgatggcggtgctgactggcctgatgctcaagtacaccatcatgcgcggtgaagcgacgccgtttgtcatggagttgccggtctatcatgtaccacacgttaaaagcctgattatccagacctggcagcgtctgaaaggcttcgttctgcgtgctggtaaagtgatcatcatcgtcagcattttcctgagcgctttcaacagcttcagcctgagcgggaaaatcgtcgataacatcaacgacagcgcgctggcgtccgtcagccgggtgatcaccccggtcttcaagccaattggcgtgcatgaagataactggcaggcaacggttggcctgtttacaggtgccatggcgaaagaagtggtagtgggtacgctcaacaccctctacaccgcagaaaatattcaggacgaagagttcaatccggcagaatttaacctcggtgaagagctgttcagtgcgatagatgaaacctggcagagcctgaaagacaccttcagccttagcgtactgatgaaccccattgaagccagcaaaggcgacggcgaaatgggtaccggggcgatgggcgtgatggatcagaaattcggtagcgcagcagcagcttacagctacctgattttcgtcctgctgtatgtaccatgtatcagcgtgatgggggctatcgcccgtgaaagtagccgtggctggatgggcttctccatcctgtgggggctgaatatcgcttacagtctggcaacattgttctatcaggtcgccagctacagtcagcatccaacttacagcctggtgtgcattctggcggttatcctgtttaacatcgtggttatcggtctgctgcgccgcgcgcgtagccgggtggatatcgaactgctggcaacccgcaagagcgtaagcagttgctgcgcagccagcaccaccggtgattgccattaatggctagtcttattcaggtgcgcgatttgctggcgttacggggccgtatggaagcggcccagataagccagacattgaacactccacagccaatgattaacgccatgctgcaacaactggaaagtatgggcaaagccgtgcggattcaggaagaacctgacggctgcctctctggcagttgtaaaagctgcccggaaggaaaagcctgtctgcgcgagtggtgggcgctgcgttaaccttactccatcgcctgttttggaaagcccggtatgcgtctgcatccgggcttttttgcgtgcggctttccataaaaatgcaactcttgcagcacggcgtaagttcctttgaaagcatctcgcagggatgaaaactcgctaatacacaggtgtggagtggcgcgtagagtcgcggcattcaaacaacaggtgaaggaacgccatgagcaaaaagcagagttccaccccacacgatgcgctgttcaaactctttttacgccaaccggacacggctcgtgattttcttgcgtttcatttaccggcacccattcacgcgctttgtgatatgaaaaccctcaagctggagagcagcagctttattgatgacgatctgcgtgaaagctattccgatgtgctgtggagcgtgaaaacggaacaaggaccaggatacatctattgtctgattgaacatcaaagcaccagtaacaaactgatcgcatttcgcatgatgcgttacgctattgccgcaatgcaaaatcaccttgatgctggatacaaaacgttgccgatggtggtgccattgttgttttaccacggtattgaaagcccctatccctatagcctgtgttggctggattgtttcgccgatcccaaactggcaaggcagctttatgcctccgcatttccgctgattgatgtcaccgtcatgcctgatgatgaaatcatgcagcaccgacgtatggcgctgctggagttaattcaaaaacatattcgtcaacgcgacctgatggggctggtagagcaaatggcctgcttattaagtagtggatacgctaatgacagacaaatcaaagggctgtttaattacatactgcaaactggcgacgctgtacgttttaacgattttatcgacggcgttgccgaacgtagtccgaaacacaaggagagtttaatgactattgcggaaagattgcggcaggagggggaacaatccaaagccctgcatatagccaaaataatgcttgaatccggagttcctcttgcagacatcatgcgctttaccgggctgagtgaagaagagttggctgcggcgagtcagtaaagttctgtctcgccatttcaaaagccacttacaccctctgcttcaacgccaccagcaggtgacaaaactcggccggatggctaataaatggcgcatgggccgctttggcgaagatataactttcgctgtgaggccaaagtttatccagcatcggcaccactttgcgcggcaccagaccgtcgagatagccatacaatcgcaaaaacggcatggacacgttttgcagcggctgacggagatcgaccgttttcaggatttccagcccgccattaagcacgtcaacctccggcatcggtaacgccagaacggttttcttcaacgcccgcgcatcctggcgcgccgtttcagtccccatggtttgtaacgccaggaaccgctccactgtacgctgaaaatcatcactgagttgctgctgaaatcccgccagcacgtccggttttatccccggccactcgtcacgagcactaaaacaaggactgctcgccacggtgaccagcgcctgaacacgctcgggatgggttaacgcaatctggcttgccaccagcccgcccagactccagcctaaccaaatggctttatcaggtgcctgttgcagcacggcttcggccatatcagcaagactcagcgcaccaaatccccggctacgcccgaagccgggcaggtcaacaaggtgcagcgtaaaatggctgctaagttcctcgtcaatgcaacgccacacttcggcattcagtccccatccgtgcagcagcacaagatgaacattcccctgacctttggtctgccaccagatgttattcatccgctattgttctcttttgacttacaaggatgaacatatgctaacagtaccgggattatgctggctatgccgaatgccactggcgttaggtcattgggggatttgtagcgtctgtagtcgcgccacccgcacagataaaacgttatgcccacaatgtggattacccgccacacactcccatcttccctgcggtcgctgcctgcaaaaaccgccgccctggcaaagactggtcacggttgccgactatgcgccgccgttaagtccgcttatccaccagcttaaattttcccggcgcagtgaaatcgccagcgccctgagtcgtctgttactattggaagtcttacacgctcgtcgcaccaccgggttgcaattgccggatcgcatcgtcagcgttccgttatggcagcggcgtcactggcgtcggggatttaatcagagcgatttgctgtgtcagccgttaagtcgctggttgcactgccaatgggatagcgaagccgtcacacgtacacgggccactgcgacccagcattttctcagtgcccggctgcgcaagcgcaacctgaaaaatgcctttcgtcttgaattgcccgtgcaaggtcgccatatggtgattgtggatgatgtcgttaccaccggaagtaccgtcgcagagattgcgcagttgcttttacgcaatggtgcggcggctgtccaggtctggtgcctttgtcgaaccttgtaaagcctcgatgatgggcgtattataaccaactaaaatagtcaactattaggccattactatgatccgtatttccgatgctgcacaagcgcactttgccaaactgctggcaaatcaggaagaagggacacaaatccgcgtatttgtgattaaccctggcacgcctaacgctgaatgtggcgtttcttattgtccgccggacgctgtggaagccaccgacacagccctgaaatttgacctgctgaccgcgtatgttgatgagttaagcgcaccatacctggaagatgcagagatcgattttgttaccgaccagttgggttcccagttaacgctgaaagccccgaacgccaaaatgcgtaaagtggcagacgatgcaccgctgatggagcgcgtggagtatatgctgcagagccagatcaacccacagcttgctggtcacggtggtcgcgttagcctgatggaaatcaccgaagacggttacgccattctgcaatttggcggtggctgtaacggttgttccatggtcgatgtgacgctgaaagaagggatcgagaagcagctgctgaacgaattcccggagctgaaaggtgtgcgcgatctcaccgaacaccagcgcggcgaacactcctactactaagttatcccctcttttgtagattgcccgatgcgacgctaaagcgtcatttcgggcctacgttgaacatgtgccagacgttggcgcagcattgctttgtcaaatcctcggttcgtttccccgcgataatatgaccaacctctcataatttaaatttaccccgctctggtgattctcaaacgccagatgttacccgtatcattcacatgggtaccaaacatactcctgacatctgactacaataattagttttagtgggtatcagtcgtggtgccgcaatatctctgttcccgattgggataattagagtttgtcgtcagaaaattgacgttacccataacaaatgaaaggccaggtaaatcatgccattagtcattgttgctatcggtgtaatcttgttgttgctcctgatgatccgcttcaaaatgaacggcttcatcgctctcgtcctcgtggcgcttgctgttggattaatgcaaggaatgccgctggataaagttattggctccatcaaagccggtgtcggcgggacgctcggtagccttgccctgatcatgggttttggcgcaatgctgggcaaaatgctggcagactgcggtggcgcacaacgtatcgccaccacgctgattgccaaatttggtaaaaaacacatccagtgggcggtggtactgaccggttttaccgttggttttgccctgttctatgaagtgggctttgtgctgatgctgccgctggtgtttaccatcgcggcttctgcgaatattccactgctgtatgttggtgtaccaatggcggctgcactgtctgtgacccacggcttcctgccaccgcatccgggtccgactgcgattgccaccattttcaatgccgatatgggtaaaaccctgctgtacggtactattctggcaatcccgaccgtgattctcgccggtccggtttacgctcgcgtgttgaaaggtatcgataagccaattccggaaggtctctacagcgcgaaaaccttcagcgaagaagagatgccgagctttggcgtcagcgtctggacctctctggtgccggtagtactgatggcgatgcgtgcgattgccgaaatgatcctgccgaaaggtcacgctttcctgccggtagcggagttcctcggtgacccggtaatggcaacgctgattgccgtgctgattgcgatgttcacctttggtctaaaccgtggtcgtagtatggatcagattaacgacacgctggtttcttccatcaaaatcattgcgatgatgctgttgatcatcggtggtggcggtgcgttcaagcaggtgctggtagacagcggcgtggacaaatacattgcttccatgatgcacgaaaccaacatttctccgctgctgatggcctggagcattgctgccgtactgcgtatcgcgctgggttccgcaaccgttgcggcaatcactgcgggtggtatcgcggcaccgctgattgcaacgacgggtgttagcccggagctgatggttattgcggttggttccggtagtgtgattttctctcatgtgaacgatccgggcttctggctgttcaaagagtactttaacctgactatcggcgagaccatcaaatcctggagcatgctggaaaccattatcagcgtgtgcggtctggtaggctgtctgctgctgaatatggtgatttgataacactgactgccggatgcggcgtgaccgccttatccggcctacgattcgggatgaattagtaggccggataagacgcgtcaagcatcgcatccggcatcaaccgcactttacttcttcttcgctgcagctctgcgccgtctgtccaaatccttcagcaacttgttcacgccatcatcggcaaacatgctctcaagcgttgcggaaagcttgcgtcgccagtttttatactggtaactggtgccaggaatattcaccggttcggccatatccagccagtcttccggctgtagtcctaacagagcactgttactgtcggcaatgtagcgctgcaaaccacggttcagcgtcggcgtcatgctcatcaagcttgccttatgcccggcacgtttcggcagacaaccatatttatgcagtgcatccagcagcccttgcttcgccagttcgcgatcctgatacagaccgcgcagtaccacttcatccggatacagccccagggttttgcccagcgttagatccccgcactcccagtaaccgcgcagcgttggcaggtcatgtgtcgccgcaaccgccatgctctgctccggatacgctttcggtgcacggaacgtcttctcgtggtcgttttcgaaatagagcactttgtaagagtacacaccgctgctgcgcagcttaccgacaatctctaccggtacggtaccgagatcttcaccaatcaccatacagcgatgacgtttactttcgagtgccagaatgctgagcagatcatccaccggatagtgaacatacgcgccctgatctgccgtctcgccatacggtatccaccacaaacgcagcatgctcatcacatggtcaattcgtaatgcgccgcagttttgcatattggcacgcaacagctcgataaacggttcataggcacgcgcggtgatgatatgcgggtccattggcggtaatccccagttctgccccaacgggccgaggatatccggcggcgcgccaacgcttgctttcaggcaatatagttcacggtcacaccaggtttccgccccaccttccgctacgccaaccgccagatcacgatacaagccaatcggcatttcatagccctggcttatctcccagcaggcggcaaactggctgtaagccagccactgcaaccagagataaaaatcgacgtcatcacgatgttcttcgcagaactgacgcacttctggactatccacgttctgatacatctctggccatgcaggccagccccagcgcatttcgtcctctttcacttgctgggcatgtagcgcatcaaaggctgcctgccagaacaggctgtcgccctgctctgcaacaaactggcgaaacgcggccatctgctcatcatcacgttgcgcgaaacctttccacgccattcgtaatgctgtcatttttagggcggtaaccgtggagtaatcgacccagtcggcatcgcgcgcctgttgcagcgtctgttgcgtggtcggcaactgccaccaggcctgagcctcttcgctaagatggaaatcttcaacggcgttaacgtcgatataaatcacattcagccaacggcgagaagacgggctgtatgggctggcgctctccggatttgccggatagagcgcatgaatcgggttcaggccaatgaagctcccgccacgttttgccacatccaccagcatcgctttgagatcgccaaaatccccaataccccagtttttttcgcttcgcagcgtataaagctgaacgcaggcaccccacagcttttgtttattcagcaacgcctgcggttcgtaacagcgtttcggggcgacaatcacccggcaatgcgcgcgctggtcgtcctgggtgagtgtcagcgtgtgataaccttccggcagcttcgtcggtagattgaacgctttgccccccgttacatggcctttgtactgcgttccttcttcggtggtcagcagccagctatattcgccgctgccctccaccaccatcggcatttttttgccgctggtataaaccatgacattcgggactggcgttaccgccactttcgtggcggtacgttgatgcatcgcgtcaagcaaacgccgtttggtttcggcgctaatgctctgcggtttaccgtgggcattgatgtaattggggctaatccccgccgccagcgcggcattatccagacgtttgctttccatcgagcttccttagcgttttgcctgccagatacgagcctgataatcgcgaatagagcgatcgctgctaaacataccgcagcgggcggtattgaggatcgccgcgcgagtccaggcctcctggtcgcggtacagcacatccacctgcttttgtgcctctacataggctgcgaaatccgccatcaccagatacggatcgccgccctgtttgccgatactgtgcagcatctggtcgaaggcatgcttatcgccgtcgctgtatttaccgctttccagctctttcaatactgcgtccagcaccttatctttcttccgccatttcaccgggtcgtagcctttggccagaattgccttcacttgttccacggtatgaccaaaaataaagatattttcttcaccgactttctcggcgatttcaacgttcgccccatccagcgtaccgacagtaagcgcaccattgagcgccagtttcatattgccggtaccggaagcttctttacctgcagtgctaatttgttcggagatatccgccgccgggatcagtttttccgccgcgctaacgcaataatccggcaggaacaccaccttcaacttatcgccaaccagcggatcgttgttgatcacgtcagccactttgttgatcgcaaagataatattcttcgccaggtagtagcccggtgccgctttcgcgccgaagaggaagacgcgcggtacgcgatcagcctgcgggttttcacgaatttctttgtacaacgccagaatatgcagcagattcaggtgctggcgtttgtactcatgcaaacgtttgatctgaatatcgaaaatcgcctgtggattgatctcaataccggtacgaactttcacaaactccgccagacggactttattcgcctgcttgatctcgcgatattgctgacggaatttcgcatcatcagcgaatttttccagattgatcagctgatcgagatcgttagcccactctttttgcagacttttatccaacagagccgccagtgccgggttgcactgtttgatccagcgacgtggggtaataccgttggtgacgttatggaatttgttcggccatagctggtgatattccgggaacagatctttcaccaccagatcgctgtgcagcgccgcaacaccgttcaccgcgaaaccgccaaccacacacaggttcgccatatgcacttgtttgtcgtgcaccaccgccagtttggcccacactttttcatcgcccggccaggttttctctaccagcgttttaaagcgagtattaatttcgttaataatctgcatgtggcgcggcagtaagcctttcaccagtttcacatcccagcgttccagcgcttctggcatcagggtatggttggtgtaagcgaaagttttgctggtaatggcccaggcgtcatcccagctcatctggtgctcatcgatcagcacgcgcagcagttctggaatcgcgatagttgggtgggtatcgttcagctgaataacttcgtaatccgccagttcgtgcagtttacgccccgccagatgatggcgacgcaaaatatccgctacgctacaggcacactggaagtattgctgcatcaggcgcagctttttaccggcagtatggttgtcgtttggatagagaactttggtcagtttttccgcattgatgccctgctgttcggcacgcaagaaatcaccgtcgttaaatttagtcagatcaaacggatgcgcgtgcgtcgcctgccacagacgcagcggctgcgccacgccattacgatagccgacaacggggagatcccacgcttgaccggtaatggtaaactccggctcccagcgtccgtctttcgtcactttaccgccaatccctacctgcacatccagtgcttcgttgtggcggaaccacgggtagttactgcgatgccagtcatccggcgcttcaacctgtttgccatcgacaaaagactggcggaacaaaccatattgatagttcagaccgtaacccgtcgcagactgaccgacagttgccatactgtcgaggaagcacgccgccagacgtcccagaccaccgttacccagcgccgggtcgatctcttcttccagcaggtccgtcagattgatgtcataagccttcaagctatcctgtacatcctgataccagccgagattcaacaggttgttgcccgtcaggcgaccaatcaaaaactccatactgatgtagttaacatgtcgctgattcgccaccggcttggcgaatggctgagcacgcagcatttcggccagtgcttcactcactgctagccaccactggcgaggagtcatttcagccgcagaatttaagccataacgctgccactgacgactaagcgcttcctgaaattgcttatcgttaaaaataggttgactcataggagttccacttttcttagattttcaacacaacgttatcgctagtttgccaggctcgatgttgaccttcctcatcctgcgggggattaggcagggaggagttgcggggatgagcaaggaaatgtgatctcaaccacttaaagctagtgcaaaccacaggattagcatcaaatcaatgcaatacagcgcagaaaatctgtatctaagtgcaaaaaatggccgttgcgtattttcaaaaagcggaaggtaactctataaattaagtaaaggagtgaaacagtttcataagtaaaatatccagtgtgctccatctcattcttaatagatttattaagatcatctttttagatggcactttcatcaggaatgaagaagaaacccttgcttaaatgaatctgatgaacataagggaaaccagtattcacgctggatcagcgtcgttttaggtgagttgttaataaagatttggaattgtgacacagtgcaaattcagacacataaaaaaacgtcatcgcttgcattagaaaggtttctggccgaccttataaccattaattacgaagcgcaaaaaaaataatatttcctcattttccacagtgaagtgattaactatgctgattccgagtaaactaagtcgtccggttcgactcgaccataccgtggttcgtgagcgcctgctggctaaactttccggcgcgaacaacttccggctggcgctgatcacgagtcctgcgggctacggaaagaccaccctcatttcccagtgggcggcaggcaaaaacgatatcggctggtacagcctggatgaaggtgataaccagcaagagcgtttcgccagctatctcattgccgccgtgcagcaggcaaccaacggtcactgtgcgatatgtgagacgatggcgcaaaaacggcaatatgccagcctgacgagtctcttcgcccagcttttcattgagctggcggaatggcatagcccactttatctggtcatcgatgactatcatctgatcactaatccagtgatccacgagagtatgcgcttctttattcgccatcaaccagaaaatctcaccctggtggtgttgagtcgcaaccttccgcaactgggcattgccaatctgcgtgttcgtgatcaactgctggaaattggcagtcagcaactggcatttacccatcaggaagcgaagcagttttttgattgccgtctgagtagcccgattgaagccgcagaaagcagtcggatttgcgatgacgtttccggttgggcgacggcactacagctaatcgccctctccgcccggcagaatacccacagtgcccataagagcgcacgccgcctggcgggaatcaatgccagccatcttagcgattatctggtcgatgaggttttggataacgtcgatctcgcaacgcgccattttctgttgaaaagcgccattttgcgcagtatgaacgatgccctcatcacccgtgtgaccggcgaagaaaacgggcaaatgcgcctcgaagagattgagcgtcaggggctgtttttacagcggatggatgataccggcgagtggttctgctatcacccgctgtttggtaacttcctgcgccagcgctgccagtgggaactggcggcggagctgccggaaatccaccgtgccgccgcagaaagctggatggcccagggatttcccagcgaagcaattcatcatgcgctggcggcaggcgatgcgctgatgctgcgcgatattctgcttaatcacgcctggagtctgttcaaccatagcgaactgagcctgctggaagagagccttaaggccctgccgtgggacagcttgctggaaaatccgcagttggtgttattgcaggcgtggctgatgcaaagccaacatcgctacggcgaagttaacaccctgctagcccgtgctgaacatgaaatcaaggacatcagagaagacaccatgcacgcagaatttaacgctctgcgcgcccaggtggcgattaacgatggtaatccggatgaagcggaacggctggcaaaactggcactggaagagctgccgccgggctggttctatagccgcattgtggcaaccagcgtgctgggtgaagtgctgcactgcaaaggcgaattgacccgcagtctggcgctaatgcagcaaaccgaacagatggcacgccagcacgatgtctggcactacgctttgtggagtttaatccagcaaagtgaaattctgtttgcccaagggttcctgcaaaccgcgtgggaaacgcaggaaaaagcattccagctgatcaacgagcagcatctggaacagctgccaatgcatgagtttctggtgcgcattcgtgcgcagctgttatgggcctgggcgcggctggatgaagccgaagcgagcgcgcgtagcgggattgaagtcttgagctcttatcagccacagcaacagcttcagtgcctggcaatgttgattcaatgcagcctggcccgtggtgatttagataacgcccgtagccagctgaaccgtctggaaaacctgctggggaatggcaaatatcacagcgactggatctctaacgccaacaaagtccgggtgatttactggcaaatgaccggcgataaagccgccgctgccaactggttgcgtcatacggctaaaccagagtttgcgaacaaccacttcctgcaaggtcaatggcgcaacattgcccgtgcacaaatcttgctgggcgagtttgaaccggcagaaattgttctcgaagaactcaatgaaaatgcccggagtctgcggttgatgagcgatctcaaccgtaacctgttgctgcttaatcaactgtactggcaggccggacgtaaaagtgacgcccagcgcgtgttgctggacgcattaaaactggcgaatcgcaccggatttatcagccattttgtcatcgaaggcgaagcgatggcgcaacaactgcgtcagctgattcagcttaatacgctgccggaactggaacagcatcgcgcgcagcgtattctgcgagaaatcaatcaacatcatcggcataaattcgcccatttcgatgagaatttcgttgaacgtctgctaaatcatcctgaagtacctgaactgatccgcaccagcccgctgacgcaacgtgaatggcaggtactggggctgatctactctggttacagcaatgagcaaattgccggagaactggaagtcgcggcaaccaccatcaaaacgcatatccgcaatctgtatcagaaactcggcgtggcccatcgccaggatgcggtacaacacgcccagcaattgctgaagatgatggggtacggcgtgtaagtttagccggataacgcgccagatccggcttacatctctgcatcattcaatgctcacccgcgttacgccatctgtttctatcaaactaaaccgcaccggcaagaaacgctccaccaccgcgatattggtcagcagatggcaactgggatgggcgaccgtaaattcccccgcgcccgccagcgccatcggtagcaccagttggtcagcaagatattcccccaccgccgccgtgcttgccaggtagcgtttcacctctttcaccaactgtgccgcaaccacctcggcactgacgcgcttttcaccgacgacaaaaaagcgttcggtgatattttcactttcgacttcaaggctgacggtattacccggcccctggtcgcgcggcaggttatgaatattctgttcatgcagggaaaaactccccgccagtgtagcgatttcacgctcagcaacatggcgcggcacaccagctaatagaacttctccacgcatctgcacaatgttcccgcgctcgccaagttgcaaggtgttaaagcttgccacggggctgacttccgttgccaccacaccgcctccggcagggtaaaaaccgtggcgtaacagcgtggtttgctgatgaattcctattttcgccagcagcggctccagcacccggcggataaaatccgcaggcggcgcgctcgggttatcggtgccgccgctcacttcaacacggctaggtccatcggcaaaccacagcgcgggcagcaccgtttgcagcaccagcgtacaacttccggcgctaccgatagcaaagcggtaatcgccgccgcgcacggtgccgggccggaagagcagacgctggctccccagctccgcgccttccacggttgctccgcaaatttccgtcgccgcctttaccgcggtcagatgctggcgcaacagccccggtttcgcccgcccggcacgaatgctggtgatggtaaatggctggccggttatcatgctcaggctcagcgcgctgcgcaggatctgcccgccaccttcgccctgtgcgccatccagcgcaatcatccttttcatcatttatccttttacgcacaccacctgacgcagggtatagataacttccaccagatcgctttgtgccgccatcaccgcatcaatatctttatacgccatcgggatttcgtcgatcacttcggcatctttacggcattccacatgcgcggtggcacgaatttgatcttccacgctgaacagttttttcgctttagttcggctcattacccgcccggcaccgtggctgcagctacagaagctctcttcatttcccagcccacggacgataaagctttttgctcccatgctaccgggaataattccatattgaccagcacgcgcagacaccgcgcctttacgcgtcacgtagatctcttcaccaaagtgctgttctttttgcacatagttgtggtgacagttgatctcttccatcgccagcgtttgtggctgtctgaccgttttctgcgtaatgctctgcaatgccgttaccacgttttccatcatcgcatcgcggttaaggctggcaaaaagctgcgcccaggccacggctttcaggtaatcatcaaagtattccgtaccttccataaagtacgccagatcacggctcggcaacgtctcaagcgtttcctgcatctctttttgtgccagatcgataaagtaagtcccgatggcgttaccaattccgcgactaccggagtgcagcataatccacacctggtcgctctcatcaaggcagatttcaataaagtggttaccggttcccagcgttcccaggtgtttatagttattggtattcaggaaacggggatatttttgcgttaaccactgataaccggcttcaagctcagcccatttagcatcgacgttaacaggtggattttcccaggcacctttatcacgtttacaacggccagtggtacgcccgtgcggcacggccgtttcaatcgcctgacgcagctctgccaggttttcaggcaggtcttccgccgttaacgcggtacgcagcgcgttcattccacagccaatatccacgcccaccgccgccggaataatcgcccctttggtcgggatcacgctaccaatggtggaacctttacccaggtgtacatcaggcattaccgcaatatgtttgaaaataaacggcatcttcgccgtattaataagttgctgacgcgcatcggcctctaccggcacgcctttggtccacatttttaccggggcattttcagtggtcagtaattcgtaattcattttgtttttctcttttcgttgtttgctgtcctgataattgcaaccgtcgtgccagaaaattaaataagcagcttaattttttaattcattgttttaaaaaagattatatctttacgtccgtaaccggagatttcccgcaaagccaatttaccgataatgaaatatcgtcttttataaggatatctaagatgcgtaaaacagtggcttttggctttgtcggtaccgtactggattatgccgggcgcggcagtcagcgctggagtaaatggcgtccgacactctgtttatgccagcaagaaagcttggtcatcgatcgactggaattgttgcacgacgcccgcagccgcagcctatttgaaacgcttaaacgcgatatcgccagcgttagcccagaaacagaagtggtgagcgttgagattgaactgcataacccgtgggatttcgaagaggtctacgcctgcctgcatgatttcgcccgtggttacgagtttcagccagaaaaagaagactatttaattcacatcaccaccggtacccacgtcgcgcagatttgctggtttctgctggcagaagcgcgttacctgcccgcccggctgatacaatctagtcctccgcgcaaaaaagaacagccgcgcggcccaggtgaagtaacgattatcgatctcgatttaagccgttataacgccatcgccagccgctttgccgaggaacgccagcaaacgcttgattttcttaagtccggcattgccacgcgtaacccccacttcaaccgcatgattgagcagatcgaaaaagtggcgatcaaatcccgcgcgccgattctgcttaacggtccaaccggcgcgggcaagagttttctggcgcgacgcatcttagagttaaaacaggcgcggcatcagtttagcggcgcgtttgtggaagtgaactgcgccaccctgcgcggcgataccgccatgagcacgctgtttggtcatgtaaaaggcgcgtttaccggggcgcgggaatctcgtgaaggtttattacgcagcgccaacggcggaatgttgtttcttgatgagattggcgaactgggcgcagacgaacaggcaatgctgctgaaagccattgaagagaaaaccttttacccgtttggcagcgatcgccaggtgagcagtgattttcagcttatcgccggaacggtgcgcgatttgcgccagctggttgccgaaggcaaatttcgcgaagatctgtacgcgcggatcaatctctggaccttcaccctgccgggtctacgccagcgccaggaagatattgaaccgaacctggattatgaagtggagcgccacgccagtctcactggcgacagcgtgcgttttaacaccgaagcgcggcgcgcctggttggcttttgcgacctctccccaggcaacatggcgcggtaactttcgcgaactttctgccagcgtcacgcggatggccacctttgccactagcggacgcatcactctggacgtggttgaagatgagataaaccgtctgcgctataactggcaggagagccgcccctccgcgcttacggcgttgctgggcgcagaggcagaaaacatcgatctcttcgaccgtatgcaactggaacacgttatcgctatctgccgccaggcaaagagcctttccgcagccggacgccagctttttgacgttagccgccagggcaaagccagcgtcaatgacgcggatcggctacgcaaatacctggcgcgttttggtctgacgtgggaagccgtgcaggatcagcacagctccagttgaatatggtggtccgtcagcacctgcatcacgcttactggcggcggggcgtcggtgtagacggcatctaccatgctgatgctgcccatattgaccatcgcgttacggccaaatttcgagtgatcgacaaccagcataacgtggcgcgagttctcaataatggcgcgtttggtgcgaacttcgtggtaatcgaactccagcagcgagccgtcgctatcgatgccgcttatccccagaatgccgaaatcaaggcggaactgggagataaaatcgagcgtcgcttcgccaatgatcccgccatcgcggctgcgtaattcgccaccggcgagaatgatgcgaaaatcttcttttaccatcaacgtgttagcaacgttgagattgttggtgacaatgcgcaaattgctgtgattgagcagtgcgtgcgctaccgcttccggcgtggtgccgatatcgataaacagcgtcgagccattggggatttgctccgccactttgcgggcgatgcgctctttttcttcggtctgggtggccttgcgatcgtgccacggcgtgttaaccgaactggaaggcagcgccgcaccgccatgatggccaggatcaggttttgctccgccagctcattgaggtcgcggcgaatagtctgcgggctgacggagaaatgctctaccagctcttcggtactgacataaccctgctgtttaaccagttcgataataccgttgtgacgttgtgtttgtttcatttataaatccctggaattattttcgttttcgcgcattgaggctatcaacaaaagccatcgctaaacccacggctaacccggcgatgtgtgctccgttcgccatgctcatcccaaacaaatcaaaccatccggcgacaatccagatcagcgcaaagataattaacccacgttgcaggtaaatgccactttgcggatcgcgttcgccacgtagccagacgtagcccatcagcgcatacaccacgccagaaagcccgccaaaccacggcccgctgaatttttgctgcacatagccgcttaacagggcgctgataagcgtaatgacaattagcttaccgctaccgaggcgtttttccaccgcaccgccgagataccaccaccagagcaggttaaagaggatatgcatcaggctgaagtgcattaacgcgtgggtgaagtaacgccagaactcaaatttcagtgttggatcgaatggccaggccagccataacatcacttcctgatcgccgagaatttgcatggcaataaacaccaccacgcaggcgatcatcatcacccaggttaccggacctgcgcgttcacgcaaggcggcaaagaaaggataacggcgataatgcaggccactgccggtatggcctgcctgccagctcgccgccagataacgcggatctgccgggttttcgagaaaacgcgccagctccgcccgtacgcgctcggcctgggactcatccgccagccagacatcgctttggttatgttgttgaatcgtgaggataacaccctgcgtcgccatgtaatcaacaaacgcctgcgccacgcgggggttagcaaaagaggtaatcatcaacatcgttgctgtcgcttattccacacaaaaggggacagtataaagcgttacgcgccgtacgccacctctgcgggaaactgacgttgccaggcttcaaagccgccgtcaatgctatagaccacatcgtagccctgttgcagcagatactgcgccgcgcctttgctgctattgccgtgataacacatcaccatcaccggagtgtcaaagtcgttatcacgcataaaagcgcccagcgtgtcgttggttaaatggaaagcctgcaccgcatgtcccattgcgaaactctgtggatcgcgaatatcgaccagcaccgcctctttttcctgcaacttctggtgcgcgtcggcaacgttaatacattcgaactgatccatgcgtctctctttctttacaaacaagtgggcaaatttaccgcacagtttacgtcgaagcggcagataaacgccataatgttatacatatcactctaaaatgttttttcaatgttacctaaagcgcgattctttgctaatatgttcgataacgaacatttatgagctttaacgaaagtgaatgagggcagcatggaaaccaaagatctgattgtgatagggggcggcatcaatggtgctggtatcgcggcagacgccgctggacgcggtttatccgtgctgatgctggaggcgcaggatctcgcttgcgcgacctcttccgccagtagtaaactcattcacggtggcctgcgctaccttgagcactatgaattccgcctggtcagcgaggcgctggctgaacgtgaagtgctgctgaaaatggccccgcatatcgccttcccgatgcgttttcgcctgccacatcgtccgcatctgcgcccggcgtggatgattcgcattggtctgtttatgtacgatcatctgggtaaacgcaccagcttgccgggaagtactggtttgcgttttggcgcaaatagtgtgttaaaaccggaaattaagcgcggattcgaatattctgactgttgggtagacgacgcccgtctggtactcgccaacgcccagatggtggtgcgtaaaggcggcgaagtgcttactcggactcgcgccacctctgctcgccgcgaaaacggcctgtggattgtggaagcggaagatatcgataccggcaaaaaatatagctggcaagcgcgcggcttggttaacgccaccggcccgtgggtgaaacagttcttcgacgacgggatgcatctgcctagcccttatggcattcgcctgatcaaaggcagccatattgtggtgccgcgcgtgcatacccagaagcaagcctacattctgcaaaacgaagataaacgtattgtgttcgtgatcccgtggatggacgagttttccatcatcggcactaccgatgtcgagtacaaaggcgatccgaaagcggtgaagattgaagagagtgaaatcaattacctgctgaatgtgtataacacgcactttaaaaagcagttaagccgtgacgatatcgtctggacctactccggtgtgcgtccgctgtgtgatgatgagtccgacagcccgcaggctattacccgtgattacacccttgatattcatgatgaaaatggcaaagcaccgctgctgagcgtattcggcggtaagctgaccacctaccgaaaactggcggaacatgcgctggaaaaactaacgccgtattatcagggtattggcccggcatggacgaaagagagtgtgctaccgggtggcgccattgaaggcgaccgcgacgattatgccgctcgcctgcgccgccgctatccgttcctgactgaaagcctggcgcgtcattacgctcgcacttacggcagcaacagcgagctgctgctcggcaatgcgggaacggtaagcgatctcggggaagatttcggtcatgagttctacgaagcggagctgaaatacctggtggatcacgaatgggtccgccgcgccgacgacgccctgtggcgtcgcacaaaacaaggcatgtggctaaatgcggatcaacaatctcgtgtgagtcagtggctggtggagtatacgcagcagaggttaagcctggcgagctaaattaacgtaaggtgatcaggtcagatttcaatctggcctgagactgatgacaaacacaaaactgcctgatgcgctacgcttatcaggcctacgtggtttatgcaatatattgaatttgcatggtcttgtaggccagataagacgttcacgtcgcatccggcatgaacaaagcgcactttgtcaaaaatctaacctactttttaattcagggaattaccgcaaagcccacgccatcatacccaacgtaacaaaactcaggcacgttccccactcgcccgctgaaaaatagcattaatgcgcccagcgccagcataaaaattttgagcagaaggtaaattgttggcgtgataaggatattacaaacttcaataataccggcaagtccgacacccagcatggcaataaccaccgccaaaaattgcgccagtatggggatgccgaaaaaagtcattaccaggctggtcaaaatccattttctgttttgcattattctttccattctttttgaatggtgaaattatactccccgagtccccttgccccttctggacacttttccgaaatgatggcggaaaaaaacgggaccctttggccccgttctatttattggtgaacttacaatctcaccggatcgatatgccagatatgatcggcgtactctttgatagtacggtcagaagagaagtagcccatattggcaatgttcagcatcgcttttgcggtccactcttcctgaagctcgtagagttcatcgactttatcctgacaatcgacatagctgcgataatccgccagtacctggtagtgatcgccgaagttgatcaggctatcaaccagatcgcgatagcgacccggatcttccggactgaatacaccgctgccgatttgcgtcagcacctgatgcagctcctcatctttctcgtagtattcacgcggtttgtagccctgacgacgcagttcttccacttcttccgctgtgttaccaaaaataaagatattgtcagcaccgacatgatccagcatctcgacattcgcaccgtccaacgtaccgatagtcagcgcaccgttaagcgcaaacttcatgttactggtgccggaagcttccgtccctgccaggctaatctgttcagacagatctgccgccggaatgatcaactgcgccaggctaacgctgtagttcgggatgaacacgactttcagcttatcgccaatctgcggatcgttgttgatcactttcgctacgtcattgatcaaatgaataatgtgcttcgccatgtaataggcgctagccgccttaccgccaaaaatattcacgcgcggtacccacttcgcatccgggtcggccttgatgcggttatagcgggtaatcacatgcaacacattcatcaattgacgtttgtattcgtgaatacgtttgatttgtacatcgaacaacgcctttggattcaccaccacattcagctgctgggcgatatactctgccagacgctttttgttctccagcttcgcctgatgcacagcgtgattaaccattgggaaatcacagtgttgttgcagctcattaagcaggctaaggtcggtgcgccagttacggcccaggtgttcgtccagcacggcactaaggcttgggttcgctaccgccagccagcgacgcggcgtcacaccgttggtgacgttggtgaaacgacccgggaagattttcgcaaagtcggcaaacaagctttgcaccatcagattagagtgcagttcgcttacaccgttaactttgtggctcacaacaaccgccagccaggccatacgcacacgacgaccgttggattcatcaatgatgctcgcccgtcccagcagatcggtatcgttcggatactgttcctgcaaggttttcaggaaatagtcgttgatttcaaagatgatctgcaggtgacgcggcagaattttacccagcatatcaaccggccaggtttccagcgcctcgctcatcagcgtgtggttagtgtaggagaagacctgacaacacacctcaaacgcgtcgtcccagctaaattggtgctcatcgatcagcagacgcatcatctcaggaatgctcagtaccggatgggtatcattgagatgaatcgcgattttatccgccaggttatcgtaggttttatgcaactgataatggcggcttaaaatgtcctgaatggtgctggaaaccaggaagtattcctgacgcaggcgcagctcacgcccggagtaggtggagtcatccggatacagtacgcgagatacgttctcggagtggtttttatcttccactgccgcgaagtagtcaccctggttgaatttaccgaggttaatttcgctactggcttgcgcactccacaaacgcagcgtgttggtcgcgtcggtgtcgtaaccagggattatctgatcgtaagcgactcccagaatctcttcggtttcaatccagcgcgtttttttaccttcctgctgaatgcgaccgccaaaacggactttatagcgcgtgttgtggcgtttgaattcccacgggttaccgtattccagccagtagtctgggctctctttctggctaccgttaacgatgttctgcttgaacataccgtagtcatagcggatgccgtaaccgcgccccggcaaccctaacgtcgccagagaatcaaggaagcaagccgccagacgtcccaggccaccgttaccgaggcctgggtcattttcttcatcaatcagctcttcgagatttaaccccatcgcttccagtgcgccctgtacatcttcgtaaattcctaggctcaacatggcgttggagagcgtacggccaatcaaaaactccatgctcaggtagtaaacctgacgagtttcttggctcaactgggcacggttactacgtaaccagcgctccacgagacgatcgcgcacagcaaataacgttgcgttcagccattcatgtttattggcgacgaccgggtcctttccaatcgtaaacatcagcttgtaagcgatagagtgcttaagagcttctacgctaagcgtggggctactatatgtaaacggagcattcatataggcgtttcctgaaaattatttcaagcgatagtaaagctcacggtagctcttcgccgcgacctgccagctaaaatccattgccatagcctgacgttgcacaaaccgccacagactaggacgggaccacagtacaaaagcacgtcgaatagcccgtaacaggctccaggcattactatcttcaaagacaaacccactggcgacgccatctgcaaggttctcaagagaacagtcagaaaccgtatcagcaagcccaccggtgcgccgcactaacggcagcgtaccgtacttcaatccataaagttgcgttaagccgcacggttcaaaacggctgggcaccagaatgacgtccgcgccgcccataatgcgatggctaaatgcttcgtgatagccaatctgaacgcccacctgaccggggtattccgctgccgccgcaaggaaaccttcctgcagcaccggatcgcccgcgccgagtagcgccagctgcccgccctgctccagaagacccggtaaggcttccagcaccaggtcgagacctttctggctggtcagacggctcaccactgcaaaaagcggcactttatcgtcaaccttaagccccattgcgatttgtaactggcgcttattttccgctttatcttccaacgtatcgcgggtgtaacggctggccaacagtaagtccgtctctggactccagattttctcgtccacgccgttcagtacgccggaaagacgcccttcacggtgacgctgttgcaacagaccttccataccgtaggcaaactgcggttcggtgatctcgcgagcgtaggttggactgaccgccgtaatgtgatcggcatagtacagaccggccttcaggaaagagatttgtccgttgaattccagcccatgaatattaaagaaactccatggcaattggatgtcattcatgtgatgtgcataaaacatgccttgataggccaggttgtgcacagtaaacacgctcttcgccggacgcccgcgcgccgccagatacgcaggcgcaaggcctgcatgccagtcgtgcgcatgcaccacatcaggacgccagaatgggtcaagcccgctggccatttctgccccaacccaccccagcagcgcaaaacgcaatacgttgtcggtataggcaaataagttggtatcgtgatacgggcttcccggacgatcatagagatgcggcgcgtcaatcaggtaaatgccaaccccgttgtaatgaccgaacaacagcgtgatatgtccggcgaaggtatcacgacgggatactacctgcgcatcggtcacgccacggcgaatatcgggaaatgcaggcaacagtacgcgagcgtcaacgccgtctgcgatttgtgctgcgggtaatgccccaataacatcagccagaccgccggttttaagcagcgggaacatctcactacatacatgtaaaacctgcattatcgctcctgtttatgccctaacttccgtagcatttcgcgcgttaccagcacgatgccttcttcactacgatagaaacgacgtgcatcttcctctgcgttttcaccaatcaccatgccttccggaataacacaagcacgatcgatgacgcagcggcgcagacggcagctgcgacctacccatacttccggtaacaatacggcggaatcaatgttgcagaaactattcacgcgaacgcggctgaacagaacggactgcaccaccacgctaccggagatcacacaaccgccggaaaccagactgttaagggtcatcccgtggctaccggagcgatcctgcacgaatttcgctggcggtaaactttcattgtaggtgcgaattggccaattgcgatcgtacatatccagttccggcaccacagaggccagatcgaggttcgctttccagtaagcttccagcgtacccacatcgcgccagtacggctcggcatccgggtcggattgtacgcaagagagcgggaacgggtgcgcataggccagaccggcttcggtgatcttgggaatcaaatctttgccaaagtcgtggctggagttctcatcgcgatcgtcttcttccagcagttcatacagatagtcggcgtcaaagacgtagatacccatactcgccagagatttgctcggatcgttcggcatactcggcgggttagcaggtttttcaacgaattcgataattttatcgttctcatcaaccgccataacgccaaatgcggaggcttcttcaatcggtactggcatacaagcaacggtgcaacgtgcgcctttttcgacgtgatcgataagcatacggctgtagtcttgcttgtagatatggtcgcccgccaggatcaccacgtattccgctttataacggcggataatgtcgaggttttgggtgaccgcatctgcggtgccgcgataccagttttcccctttcattctctgctgtgctggcagcagatcgacaaactcgttcatttcttcattgaagaaactccagccgcgctgaatgtgctgcaccagagtgtgggactggtactgggtgatcacgcccatacgacggatcccggagttgatgcagttagacagcgcaaagtcgataatgcggaacttaccgccgaagtgtacggccggttttgctcgcttattggttaaatccttcaggcgggtaccacgtcctcccgccagtatcagggcaacagatttcaatggcagctggcgcgccaacattaagtgatcgttcttctctaaactaaccatgactaactccttttttatcatctctggaacacacacaatccgtgtgcaggtccctgccagacagccgtaatcactgggttatcctctccagcgaatgggggaatggcgtgccactccccagcaggtaaaacaatctctgttacctcaagcgtggcgttaattgcgatcaaaaagcgatcgctgagcagaatttgcagctgtttcggcccgttttgccactcatccgtgcttaaaggttgagcatatcgatttagccaacggacattgccgtcgccttcttcccaccagcgattctccaccaaagcgggaatgcgcttgcgcagatggattaacgcggcggtaaatgcggttaaaccactgcttgcctggctccagtccaaccaggttaattggttatcctgacagtaggcattgttattgccatgctggctgtgaccatgttcgtcaccggccagtaacatcggcgtaccctgggagagcaacaacgttgttaacagggcgtgaatgctgtcgcgccgccgttcaaccaggtcaagagaaccgcctaacccttctttaccatgattgttactgtaattgttgttggtcccgtcgcgattttcttctccgtttgcttcattgtgtttatggttgaagcaaacgcagtcgcgaagcgtaaaaccgtcatgcgcggtgacgagattaatcgcggcactcggcagacgaccattacgtttaaaaacatcgctggaggcagcaaaacgcccggcaaacgcccccagaggcaaatcataatgtagccagaaacgacgggcagcatcgcggaaatgatcgttccactcggcaaacagcggcgggaaatttcccacctgataaccaccaggagcgatatcccacggttcagcaattaacttcacctggctgagcaccgggcagttctggatagcggtaaacaacggcgcatcctgacggaactctggcgtacggcccatgactgccgccagatcaaagcggaaaccatcgacgtggcaggtttctacccaataacgcaggcaggcgctggcataatccaccaccgccggatgactcaaattgagcgtgttgccgcaaccggtccagttgtgataatcgccgtcttctcttatccaataatagctacggttatcgatcccacgcaggctgaataacgggccgtcgaggtccagttccgcactatggttgagcacgatatcaagaatgacttcgatacccgctttatgcagtgctttgattgcatcgcgaaactcatccagcgccgtttctgggctgcaggcatacgccggatgcagcgcaaacatcgccaccgggttgtaaccccagtagttacttagccccatgcgttgcagacgtggttcactggcaaactgcgccactggcagcagttccagcgcggtaatgcccaattgtttcaaatagttgatcatcaccggatgcccgagggctttataagtgccacggatctcgaccgggatctccgggtgcaagtacgttaatcctttgacatgggcttcataaatgatggtgctgccccacggcgtgcgcggcggggcatcatcttcccagtcatagtgatcaaccaccactacgcatttcggcgcaatggcggcgttgtcgcgatagtcaggttcattatgaccggcgtgcagcagcgggttatctttaaactccccgtcaatttgccgcgcgcaaggatcaatcaacaacttcgccgggttaaagcgatgcccctcggcgggttgccaggggccatgaacgcgataaccataacgcaaacccgggcgcgcatccggcagataaccgtgccaaatgtcgccactgtgccctggcaagtcatagcgatgttcctggccattggcgtcaaagacacacagttctacccgctcggcatgagcggagaaaagtgtgaagttgacgccctgaccgtcgtaatgcgcgccgaggggagcgggtttgccaatggcgagttgtgtcattctgcctcccgaaccagccagatagtggccagcggtggtagcgtcaggcttagactatgctgacgaccgtggctggcaatctcatcgctgtgtaccgtgccgccattgcctgcattactgccgtgatagtgcatggaatcggtattgaggatttcacgccatttgcccggctggtttatgccgaagcgataatcatgacgcggtaccggcgtaaagttactggcaacgatgatttcgttaccctctttatcgcgacgcacaaagatcagcacgctgcgttctttgtcatccaccaccagccattcaaagccgtacgggtcaaaatccagttcatgcattgctttatggtggcggtaggtgaggttcagatcgcgcaccagacgctggacaccgtggtgccagttatcgccgccttccaacagatgccagtcgaggctggcgtcatggttccactcgcggccctgggcaaattcgttacccatgaacagtagtttcttgcccgggaatgcccacatccagccatagtaggcgcgcaggttcgcgaatttctgccatgcgtcgcccggcatgcggtcgagaatgctttttttaccgtggaccacttcatcatggctcaacggcaggacgaagttttcagtgtagttgtagagaatcccgaaggtcagtttatcgtgatgatactgacgataaaccgggtcgagcttcatgtagtccagggtgtcatgcatccagccgaggttccacttgtaccagaagcccagaccgcccatatcctgcggacgagaaacgccagggaaatcggtagactcctcagccattgtcaccgcaccggaaacctgctcaccaagaatacggttggtattacgcaagaattcaatcgcttcaagattctcgcgcccgccaaattcgttcgggatccactccccctctttacggctgtagtcgcgataaatcatactcgccaccgcatcgacgcgcagcgcatcaataccaaaacgttcaatccagtaaagcgcgttaccgacgaggaagttactgacttcacggcgaccatagttgtagatcagcgtgttccagtcctgatgatagccttcacgcggatcgctgtgttcatacaagttcgtgccatcaaattcggcaagcgcaaagtcatcagtcgggaagtggcctggcacccagtcgagaatcacgttcagaccagctgcgtgtgcggcatcaatgaaataacggaagtcgtcgcgagtaccaaaacggcgggttggcgcatacaggccggttggctgataaccccaactgccatcgaagggatgctcgttaatgggcagtagttcgaggtgggtaaagcccatccatttagcataaggcaccagttgatcggccagctcgcggtagctcaaccagaaattgttgtcggtgtggcgacgccaggaacccaggtgaacttcataaatagagattggcgcatcaaactgattcgcttttttgcgctcttcagtctgtacaaccttttccggcagcccgcaaataagagacgcggtttccgggcgcatttgcgcttcaaaggcataagggtcggacttcagacgcaagttgccattggcatcaatcatctcgtatttatagagctgaccgttatgcgccccagggataaacagttcccagatgccgctctctttacgcaggcgcatcgggtgacggcgaccgtcccagtagttgaattgcccaaccacgctgacccgacgggcgtttggagcccagacagagaaacgcgtacctgtgacgccatccatagtatctgcatgcgcgcctaaggtttcatacgggcgcaggtgagtaccttcagataatagccaggcatccatttcctggattagcggaccaaaacggtaaggatcatcaatcaggttttgctgaccatgccagacaacagccaactgatagcggaaaaaattcttacgtcgcggaatgacgccgctaaagaatccccgactgtcgagacactccagttttgcgagtttgcgcccggttttcggttcaatcacccacacatcggtagcgtcgggtaaaagggcacggacttccagtcccgcggtggttttatgcattcccagtacggaaaaaggatccgcaaaatggcctgcaattagcgcgttaatcacgtctctatcgatacgatcggacatgcttgtcttcctgttttattgtgtcaccccatccaattggatttttgacttctggttgtgacatttttttgacctgaacggcgcagcactctgtgcatcctctctgcgtcgtcctcacttcaggtaaggctgtgaatactcatgtattcagccacccttaaagaatagccaatgctctatttaactcccggtaaatcatgaaacatctgcgcttactcctgtattacgcactaacaggggcggcatcgcgccccagatttaatgaataaagattacgccagttgacgaagcatccgacgcagcggctccgcggccccccacagcagctggtcgcccacggtaaaggcactcaggaactctggtcccatattcagcttacgcaggcggcctaccggcgtggtcagcgtgccggtaacggcagctggggttagctcacgcatagtgatttcccgatcgttcggaacgactttcgcccacggattgtgcgcagccagcagttcttccacggtcggaatagacacatcttttttcaatttaatagtgaatgcctggctgtggcagcgcaatgccccgacacgcacacataaaccatctaccggaattacggaagatgtgttgaggatcttgttggtttccgcctgccctttccactcttcgcggctctgaccgttatcgagctgtttgtcgatccacggaatcaggctacccgccagcggcacgccaaagttatccaccggcagctcaccgctacgggttaaggttgtgactttgcgttcgatatcgagaatagcagaggacggggtcgcgagttcatctgccacatggccatacagatggcccatctgggttaataactcacgcatatgtcgcgcaccaccgccggaagcggcctggtaggttgcaacggacacccaatcaacaagatcattggcgaataaaccacccaagctcatcaacatcaggcttacggtacagttaccgccaacaaaagtcctgatgccattatttaatccgtcggtaatgacgtcctgattgacggggtcaagaatgatgatggcgtcatctttcatgcgcagagagcttgctgcgtcaatccagtaaccttgccatccgctttcacgaagctttggatagatttcgttggtataatcgccgccctgacaggtcacaatgatatcgagggcctttagcgcctccagatcaaaggcatcctgaagtgtgccagtggttccgccaaaagacggcgcagcctggccaagctgagaagtagaaaagaagacagggcgaatggcgtcgaagtcgcgctcttcaaccatgcgttgcatgagaacggagccgaccataccgcgccagccgataaaaccaacatttttcataagcgtttttttcctgcaaagatgtgtgctgtataaatgtgccggtctcctcttggcacatctttcaccatacaaaaagcagccaaagtcgcaagtgaaattaatcaatgatagcgaagccatcagtaatgcgacttatcctgctttgttagcacgcagaaagtccgcggcaattatcagggaatttgagttatgaatgaaatcatttctgcagcagttttattgatcctgattatggatccgctcggaaacctacctattttcatgtccgtactgaaacatactgaaccgaaaagacggcgggcaatcatggtgcgagagttgcttattgctctcctggtgatgctggtgttcctgtttgcgggtgagaaaattctggcatttcttagcctacgagcagaaaccgtctccatttctggcggcatcattctgtttctgatcgccattaaaatgattttccccagcgctagtggaaatagcagcgggcttccggcaggtgaagagccatttatcgtgccgttggcaattccgttagtcgccgggccgactattctcgccacgctgatgttgttgtctcatcagtacccgaatcagatggggcatctggtgattgctctgctgctggcctggggcggcacctttgtcatcctgctacagtctagcctatttttacgtctgctgggcgagaaaggggtgaacgcacttgaacgcctgatgggattgattctggtgatgatggcaacccagatgttcctcgacggcattcgaatgtggatgaaggggtaacgaggagagtttttcgaaaagaacccggtagcgtcacaactaccgggcgaacaaacttaactcaacagctggaacgcaatcatcccaacgatggcaccgacagtgccgaggatggtttccatcatggtccaggttttcagcgtttcggcttcggtcgcgccggtaaatttaccgaacaaccagaaaccggcgtcgttaacgtggctgacaacaatgctaccaccagcgatacaaatgctcagcgccgccatttgcgcaccggagtagttcagttgttcaataaccggcatcaccagtcctaccgccgttaaacaggctacggtggcagaaccctgaatgatgcgcactgcagctgccagcacgaagcaggtgatagcaatcggcaggcccatgccggttaacgcttcgcccagtgccggacctacgccagagtcaaccagcacctgtttgaacacgccgcccgcaccaatcaccagcagaatgatccccgccggttgcagcgcgtgaccgcaaatctccatcactttgtcttttggcatgccctgacgcattgccagaccgtaaatcgccaccagacaagcaaccagaatcgcggtaaacggatgaccgataaactcaaaccattcgtaagcagtacttccttccggcacaaaacgcgcggcaatggttttcagccctaccagcaccagcggcagcaggatcaggctcaggctgaatccgaaagatggcattttgccttcgccgagatgcggttcgctgatgtcgtcaggaatatgcagctcaacgtaacggctgatgaagttaccccacagcggcccggcaataatcattcccggaattgccgcacacaggccaatcaggatcatccagccaaagtcggcattcatctggcttgccagcagcatcggcgctggtccaggcaccagaaatgccgccgctgccgccacgcctgcaaataatgggattaccagcttcaccaggttcgtaccggtgtggcgcgccatactgaaagcaacgctaatcagcagaactatcgccacttcaaagaacagcggtagcgcacagaccagccccgcaaggccgatggcataatgcgcgcggctgtgaccgaaggatttgagcattttgacggcaatctgatcgactgcgccggtttcatgtaagatcttgccaaacatagctcccagggcgacaaccaccgccaggaagccgagggtgcctcccatccctttttccatcgtcgctgcgattttatcgagcggcataccagaaaaaaggccagcccccatggacaccaccattaaagccaggaaagcgtgcatacgcgccttcatgactaaaaacagcagcagtaaaacagaccctactgctgttaaaacaagcgttaatgtagtcactacttatttgccttttttaataacctcaatggtgcttgccacaacaccttccagcggttgatcgatatccaccaccagtacatcggtttcgtccgcacccggctcctgcagcgtttcaaactgcgtcaccaacatttgggttttaaagaaatggcctttgcgcgctttcaggcggatttcaatcacatcaaaatcgcctttcaaatagatgaaagagagattcggattaccttcacgcagcaagtcgcgatagtgttttttcaatgcagaacagacgatcaggctcactttattagtgcgctgcatagcaaacgcggcgtcgttcagcgcctgcaaccacggtttgcgatcgtcgtcattcagtggttcgccagacgccattttttcgatattgcgccgtggatggaggaaatcgccatcaagaaacgcggcatgaagttgatgcgccacttcactggcgaccgcagatttgccgctgccgcttacgcccatcaagacgtaaatgtggtgatcatggttagtcgtgctcaaagtggtgcccccacaatacaagaattaaaaatgttacgggtaactgttatcggtaacattgtccagccggacaatatcagaagcaatatccatccatgccttaagtgtataagtgtgagctacttcaaatttgtgggcttaaatagatccgcccggactcaaggtgaaacctaaatctaacattttcggtgtcacagattcgccacgaatacgcgccagcaggcgttcagcgccaatactgcccatccgctcacgcggcgtcagcacgctcgcaagtcgtggctccatcacctgaccaatgtcatgaccgtggaaaccggcaatcgccatatcgtcaggaacttttaaccccagacgctgacattcaaacgccgcgccgaccgccaggtcatcattcgtacagaacacgccatccagctgcggatattcccgccgcgcctggcgaatcagttcaataccggaagagtaagaagaagattgctcaaccatcacgctatatggcaccaggcctgcatccagcatcgcctgttcgtatcccttctgtttgatgatagtacgttcgtcgagacgtgcgccgagataggcaatgtggcgatgcccgcgagcaataatggcagtggtcatctggcgtgctgcttcaaagttatcaaaaccgacggcgatatcaaggcatgggctcttgctgtccatcagttccaccacgggaatacccgccacttcaatcatctttaaggtgcgcggcgtgtgggtacgttcggtgaggatcaggccgtcgatattccaggagagcatggattcgaggcgttcttgctccatttccggtttataaccgtagtgcgccagcatggtctgataaccgtgcgcgtcggtgacgctttcgattccgcgtaatacttccgcgaaaacctggttggtgagagaaggtaacaggacgccaatcgcccggctggtggcgttagagaggatatcgggcgcacgattgggaatatagcccagttcatcaagagccgcggcaatcttgccgcgtagagcgacggaaacctgctccgggttgcgtaaaaaacggctgaccgtcattttggtcacgcctacacggtcagccacatcctgaagtacgggtcttttctttttcatcgtcctgaaggtacaaaagagatagattctcttagtttaacacggacacatcagaaccttcccggggaaaacagtgcttgtttacaattattagatatacactaaatcaattgcatcgcattgtgctaacgacgcggcaaaaccccggaagcgtacatcagcacgcgaccggagcgagcgaggaagcctgcaaaaaggcaggcttcaaagatgccgttgagttttaaaccggcggcagatcgaacagtaacacttcgctgtcgctatccgcatggatggagattgcctgctcatcccagattgccagaccatcgctggtgctggctttcacgccgttaatggtgacattgcctttcaccacctggatccagacgcggcgttcagcggcaatctgatgcacgctctgctcatctttcagcaacgcccagcggtacagttccatatcctgatgcactttcaaactaccatctcgcgcatccgggctgagcaccagctgtttgccctgtacggcatcgaagcgacgctgttcataacgcggcgtaataccgttttcttcaggcatgatccagatctgatacagatgcagacgctcggtgctgcttgggttgtactcactgtgacgaatacccgtaccagcactcataatctggaactcacccgccggaacctgctctttattgcccatgctgtcctgatgctcaacagtaccttccagcacgtaggtcaaaatttccatatctttatgcgggtgagtgccgaagccctgccctgcttcaatcacgtcgtcgttaatcacgcgcagcgcggagaagcccataaagttcggatcgtaatagttggcaaaagagaaagtatgccaggagtccagccagccatgatttgcatgaccacgttcatttgctttgcgtaagtagatcatttgtattcgccccctgaatgatttcgatgggcttagtgtggacccgatctgcctgggatgatagagggtgaaaattgacccctctgttcaaaaaaattgaactattcgaggggccatcaaacttacttagcgagagttactgtggagggagaggcttgctcaaatccgcgttcaaggatttccagattggtaagaacttcagattccttgacgtaatttggcgcaccgtgggtgatggtttgatacaacgcatcataaacgcgcccgtaatcgcccatctccggcttcatctcttctctgaccgtcacgccctcgtcattgacatactccagcacaccgacgctatcatccgctgcgaatcccggttcgcccggcataatattagccttcaggctggtttcctgctggtcgataccgtatttaataaagctacctttcttaccgtgaacgataaatttcggataatcgattttcaccagatggctggttttgacgatggctttcaggtcgccataaaacagttgcgcttcaaaggtgtcgtcaggattggctttattacgcaggctgcggatgtcataagcgacgtgatccgggcgaccgaacagagaaataatctggtccatcgtatgcacaccaaggccataaaacgcgccatcctgcggcagcccaggtttggtttctgccaccgggcggtaatagtcaaaatggctttccacttcaacaatctctcccaacttgccactttcaatcgcttttttcgctgtcaggaagcaggagtcaaagcgacgattctgatacggcgtgacggtcagccctttgcttttcgccaacgcaaacagctctttcgcctgcgcaagtgtcggagtgaacggtttttcgaccagcacatttttcccggcttccagcgcgcgtttcgcgtactcgaaatggctgtccgcgtgggtgcagacaacaaccagcttaacatcgggatcgtttagtacttcgtcgagatcgctggtgaaatggatatgggaataaatgggagcctgttcttccggcttcgcatggcgacgaaaaatatgcgcgacatgccagctatccttgcggttaagtacatacggcagatggtaacgggtggtgcttttgccgaagccaataaaggcgcagttgatgaccatgatttcgtcctttttaaggtggttatttacaccttagcgcaaagcggacgtggttcctactggagtgcgcataacgaacacaagcactcccgtggataaattgagaacgaaagatcaaaaaaaaagccagcacccggctggctaagtaatactggaagcaatgtgagcaatgtcgtgctttcaggttctccgcgagggtcttcctgatcgcgagacaataataatcattctcattcgcacttgtccaacactttttgcaaaaaaatgcatttgactcgcatttgaaagtcaatgatgttgaaagggacatttaccccaaagaggacaaaggaacaaatgctcttcccacgaagagggccgctaaccttagtaccccgccgttaaatcatccacgctgcgcgggtcggatgcgccgtacaactcaccgtccggcccaaccataatgctttgtgtactgcccatcgcctctttcagcgccactttctgaccttttgcttccagcagcttgagcgtatccgggctaaaccctttttcgacacgcagctcgtccggcaaccactgatggtggaaacgcggcgcattggtcgcttcggcgacgttcaagccataatcgatgctattcaccaccatttgcagcactgtagtgatgatccggctaccgcctgggctaccggtaaccagccaggttttaccgtctttcaccacaatggtcgggctcatgctgctcagcgggcgtttgttcggcccgacggcgttggcatcaccgcccaccagcccgtaaacgttcggtacgcccggtttggcggagaaatcatccatctggttattaagcagaataccgctctcgcccgcgacaatgcccgtaccgaaggtggtgttcagcgtataggtcaccgccaccgcgttaccatctttatccaccacactgtaatgggtagtttgattactctcataaggcgcaagcttgccggggcgaatttcgctggatggcttcgctttattgatatcaatttgatcggcaatagatttggcataggctttattggtcagcgcctgccacggtactttgacaaaatccgggtcgccaagatattcgctgcggtcggcgtaggcgtatttctccgcttctgccatgatttgcatcgcatcggcgctgccaaagccgtatttcttcatatcgaagttttccagaatattgaggatttgtacgatatggatcccgccggaggatggcggtggcatggagtaaacctgatacccgcgataatcgccgcttatcggagtgcgttcgaccgctttataggctgctaaatcttctttagtgatcaagccaccgtttttctgcatctcctgggcgatctgttccgcaatcgtgcctttatagaattcgtccgggccgttttcagcaatcatctccaggctctttgccaggttcgcctgcaccagcgtgtcgccctttttcagcggctcgccctctttccagaagatagctttactgttttcgtgattcggcaacacttcgctaccgtaggttttgagatcgtcagccagcgcgtcgttaacgataaaaccatcgcgtgccagtttaaacgcgggctgcacgactttgttcagcggcatggtgccgtatttatccagcgccaggctgaaacctgctaccgtacccggtgtgccggaagccagatggctagtgagactttttttgctgtccgggttgccctgatcatcgaggaacatatcgcgggtcgctttggcgggtgccatttcgcggaaatcgatagccgtggtattgccatttttgctgcggattaacataaaaccaccaccgcccagattccctgcctgcggatgcgttaccgccagcgcgtagcccaccgccacggcggcatcaacggcattcccgccctccttgagaatatccacccccacctgagtggcagtggcgtccacagacgctaccattccctgtttcgcgcgtaccgggtggaagacatcttcctccacaccatagctgacgggcggcgcaggaggcgcggcggcggcgctaaaacaacttccactgagcagagcagcaatggccacccggcgtaaaaacgtcggttttatcatcgttattctccagagattaaggggcaaccccagctaagcctggtatataactctgaattaatcatcgttttgtcgggaagcgagtaaacttaaaggatatcttcagaggaggatacgcgatgaaacgacttctgattcttacggcactcctgccgtttgtcggctttgcacagcccattaatactctgaacaaccctaaccagccggggtatcagatacccagccagcagcggatgcaaacccagatgcagactcagcaaatccagcaaaaagggatgctgaatcagcaactgaaaacgcaaactcagttgcaacagcagcatttagaaaaccagataaacaataattctcagcgggtgttgcagagtcagccgggggagcgaaatcccgcccggcagcaaatgctgcccaacaccaacggcgggatgttaaacagcaaccgtaatccggatagtagcttgaatcagcagcatatgctgccggagaggagaaacggcgacatgctgaatcagcccagcacgccgcagcctgacattccgttgaaaactattgggccgtaattattgggccgtaaagttcggaccaatcacgtcaatcgcatcggtacagatgcaatccacaccccagcgcagcaactctgctgcgcgctggggtttattgacggtataaaccagaatccgcagtccggcgtctttcaactgcatcactcgcgctttattgagtaacttatgattgagatgaatagagacgcagcccagccgcgcggtcagttcgcgccagtcgtcgcgccactcatccagcaacaaaccgcgcggcagttccggtgccgcctgttgtgcagcttctaaagcatcaatctcaaagctactcagcagcggcggcgtcataccggcccacagctcgcgtgccgccagcgccaccattttgcccgttaatggcccggtgccggtggtgggtttgatttcgatattcgccatcatcccgtgttcgcggcaacgttccgccacctggctaagcaacggtagcggctcacctttaaacattttgctgtaccaactgcccgcatccacgcgcagtaaatcctgccagttcagttcacccgcgacgccccagccgttgctggtacgttcgagattgtcgtcatggagcaggaagatctcgccatctttgcttaacttcgcgtcaaattcgatcatcttatgaccgtattttgccccgacgtcgatactcgccagggtgttttccggggccagcttaccgccgccacgatgagcgacgatgcggggataaggccagttactcatactcgttgtcctgtttcaccatcaaaaagatgcagctgattttccgccagatgcagccacagcgtgctgcctgccgtcgggcgctcctgatgcgccagtcgcaccaccagcttctgctcgccccagcgtccgtgcgccaggttatctgcgccgaggatctccagcgtgtccatcaccatcggtacgccgccttctgcctggctgcttagcgcaatatgttccgggcgaatgccgagagtcattttacgcccggcatactgacggtagccaccgtttagcggcagctcaataccgccgtccagttcgaaatgcgtgccttcgttattcacgcggcctgtcagcaggttcatcgccggactgccgataaaactcgctacaaacaggctggcgggcttttcgtagacttcaactggtgtgccaatctgttcggcaacaccgccgttcatcaccattactcgctgggcgagcgtcatcgcttcaacctgatcgtgagtaacgtagagactagtcgttttcaggcgacggtgcaactgttgcagttcaagacgcatctgcacgcgcagcttggcatcgaggttagagagcggctcatcaaacaggaacaccgccggatcgcgcacaatcgcgcggcccatcgccacacgctggcgctgaccgccggaaagctcgcgcgggcgacgtttgagcagaccgtccagctccagaatgcgcgccgcttctttaacgcgctcggcaatttgctgcttgcccatgccgcgaattttcagcccccacgccatgttttcttcgacactcatatgcggataaagcgcgtagttctggaacaccatcgcaatcccgcgatcttttggctccatttcagtcacgcgctggtcgttgatccagatatcgccttctgtcacccgctccagcccggcaaccatgcgcagcagcgtgcttttcccgcagccagacggcccgaccatcacgataaattcgccatccgccacatcaagggtcagcggtttaatgacctgggttttaccatcccagcttttggttactgcctgtaatttcagtcctgccatcttatttctcactatcgaccaggccgcgcacgaaggcacgctgcatcactaaaacaatcaccaccggagggataagcgttaacaacatcgccaccatcacactgttccattccgtggtgccttcgcctgtagcgatcatccctttgatccctgccacggtggtgccgagatccacatcggtaataatcaacaacggccacaaatactgattccagccgtagataaaggtgatcacaaacagcgccgccagattagttttggagagcggaaaaacgatgtcgcaaaagaagcgcattgggcttgcgccgtcgatccgcgcggcttccaccagctcatccggcagcgtcataaagaactggcggaacaggaaagtagcggtcgcgctggccatcagcggcagcgttaaaccggcgtagctgtcgagcatctgcaggttggcgatgacttccaccgtcgggaagatacgtacttcaaccggcagcatcagggtgataaaaatcatccagaagaagaggttacgtagcggaaaacgaaaccagacaatggcaaatgcgctgagcatgctgacggtaattttgccgagcgtaatgctgaacgccatcacaaagctgttaagcaacatccgccagaacggcgcgctattcgtgcctaccccgttcacccagatgttgtggatgttttccagcagatgtgtgccggggatgagcgtcatcggcgcggcatagacggcctgtttatccagcgtcgccgcgacaaacgccacgtacagcgggaagaggatcaccgcgatcccgaggatcagcatggtatggctgaatatcgtcagccacggacggttctcaatcattggtaacgcaccttgctttcaacatagcggaactgcaccaccgtcagcacgatgacgaggaacatcaacaccacgctctgtgcggcagagctagccagatccagtccggtaaaaccttcgcggtagatcttataaatcagcgtcgtggtggcctgaaccggcccgccggacgtggcggcgtcgatcaccgggaaggtgtcgaagaaggcatacaccaggttcactaccagcaggaagaaactcaccggggcgataagcggcagcgcaatcttaaagaagcggcgaatcggccctgcaccgtcgatggctgcggcttcgatcaagctacggggaatggattgcagcgcggcatagaagaacaggaagttgtagctgatttgcttccatacactggcaaacaccaccagaaacattgcctgaccgctgttttgcgcgtggttccagtcgtagccgaactccgcgagaaaatgggtgatcagcccgcgaccggggttaaacaggaagatccacaatacggcggcaacggcgggagccacggcgtaaggcagcaacattaaggtttgatagaaacggctgccgcgcacgatgtactccaccagcgccgcaaagaacaggcttaccagcaaaccgctgacggtgacaaaggtgctgaattttatcgtcgtccagaaggagtcgagatagtagctgtcatggaacagcgtgacgaagttatccaggccgacaaactggctggagaaaccaaacggatcgacgctttgtaggctgtaccacaacgcttcgcccgcaggccagataaaaaagataacggtgatgatgagctgcggcgcgaccagcagataaggcagccagcggctgcggaacaccggacgggaactactcattacggttaattcctgaactgtgccggatgcgcttcgcttatccggcctacacgcgatgccaggtcagataagcgaaacgcatccgacattacactgattaagacttcgtgcttttctcaaagcggcgcagcaactgatttccacgctcaacggcggtatccagtgcctgctgtggtgtcttcttaccggtccacacgctctccagctcttcatccacaatcacgcggatctgcggcatgttgcccagacgcagccctttggtgaacggcaacggcggcttattcagcatctgacgcgtcgcggtatccgcccctgggtttttctcataaaagccctgctcacgggtcaggtcatacgctgctttggtgattggcagataaccggttttctgatgccactcggcagcgttttctggcttcgcgaggaaatcgaggaacttcgccacaccggtatacgtttctttatctttaccctgcatcacccacaggctggctccgccgataatggcgttttgtggcgcatctttcgcatcggcgtcgtaaggcatcatgcctacgccgtagttaaatttggcgtactcgcgaatgttggcaagagaaccggaagaggcggtggtcatcgcgcaatcaccgttatagaacttctcggtggattcatccttacgaccgacgtagctgaagtcgcccttcttgttcatctcctcgagcatggcgatgtgtttcacctgctccggcttattgaactccagcaccgcgtccgtgccgtcaaagccgttgtttttgctggcaaacggcagaccgttccaggcgctaaagttttccagttggatccagccctgccagccgctggcgtagccgcacttcatgccggaggctttcagtttcgcggcatagtccgccagatcctgccaggttttcggcggctgttccgggtctaatcctgctttcttgaaggcgtctttgttgtaatagagaacgggggtgctgctgttgaatggctgggagagtaagtggcccgttttgctgtcggagtagtaaccactaaccgtcggcacaaactggctctcatcgaactgaatccctgcctctttaaacacgtcatacaccggtttaatggctttgctcgccatcatggtggcggtgccaacttcataaacctgcaaaatagccggcgcgttgccggtacgaaatgcggcaatccccgcgcttaaattctgttcgtagttgcctttataggtcggtacaattttgtaatccgggttttcggcgttaaaacgttgggccagagaatccacctctttacccagttccccttccatagaatgccagaacggaatggtcgtcactgcctgtgcattccccattaacgccagtccgagcgccagtgcactagctgtataatgtaacggtttcatcgtttatctctcttgttgtaccgaatgcgcgaattcacgcgttttatgctcgcggggtaacatgacatgctcgaattacagaaaaataacttttttgttacatttgtaagatagtaaggtgtcagaaagatgacaaggcggtgacggcgtgggtgagggaaaatgggagatggggcacggataagcgggaaaatatagaaggtctgaatcaaactctacagattgctcatcgtttcatgccggatgcggcgtaaacgccttatcaggcctacaagatcgtgcaaattcaacatattgccactcacccagtaggcctgataagcgcagcgcatcaggcaattttacatttgtcacctgtctcaaaggagtcttttgactccctatcaatcaacgtgttattacccgcctaaatacgcacttctcaccgcttcattcgccagcagcgcatcaccagtatcggaaagcactacatggccgttttccagcacgtagccgcgatccgccagctttagcgcctggttggcgttctgctcgacgagaaagatagtcatcccctgctcgcgcagctgctcgatggtgtcgaaaatttgctggatgataatcggcgcaagaccgaggcttggctcatcaagcagtagcaaacgcgggttgctcatcagcgcacgaccaatcgccagcatctgctgttcaccgccggacatggtgcccgcccgctgaatacggcgctcatgcagacgtggaaacagctcatacacccactttatgcgctcctggaactggtcgcgttcagcaaaaaaaccgcccatcgccaggttctcttccaccgtcatccggctgaagacgcgacgcccttccgggacaatcgccaccgcttcgcgcatgattttcgctgtctgccagtcggtaatgtctttatcatcaaacacaattcgcccgctggtggcacgcggatcgccgcataacgtgccgagcaaggtggttttccccgccccgttcgcgccaatcagcgtgacaatctcgccctgattgatatgcaggctcacctcatgcagcgcctggattttgccgtagtgggcgctgactttgtcaaaggacaacatgactttttccatcttatgcctcacctaaataggcacggatcacgtccgggttattacggatctgctccggcgtaccgtttgccagcggcgtcccctgattgaccacgtaaattcggtcgctaattcccatcaccagcttcatatcgtgttcaatcaacaagatagtggtgttgtgatgattgcgcagttcggcaatcagctcatccagctctttcgtctctttcgggttaagacctgccgcaggttcgtcgagcattaaaatctccggctgcgtcaccatgcagcgggcaatctcaagacggcgctggtcaccataggccaggttactcgcctgacggttggcgtgttccagcaaaccaatgcgctcaagccaggtcgcggcgcggtcgagcgcttcgctctgggcgcgacggaaggatggcgttttcaacaggccagagaacagcccggttttcagttgctgatgctgcgccaccagcaggttttcaattaccgtcatttcacggaacagacgcacatgctggaaggtgcgcaccacgcccatgcgggcaatttgctgccccggtaaaccttccaggtgctgatcgcgcagtaaaatggtgccgccggtgggtttgtagaatccggtcagacagttaaaaaccgtggtttttccggcaccgttagggccgattaagctgacgatctcctgcgggtacagttcaagattgacgttgttcaccgccagcaggccgccgaagcgcatcatcaggccgttaacagataataatggctgactcatgcctgctctcctttcgctgcgccgtttttcagcttcagttgcgggcgcgtcatgggcagcaagccctgcggacgccagatcatcatcagcaccatcaaaccaccgagcattaacatgctgtattcgttgaaatcacgcatcaactcgcggctcaccaccagcaaaattgccgccagaatcaccgcaaattggctgcccataccgccgagcaccactatcgccagcacaaacgcgctttcggcaaaggtgaaggattccgggctgacaaagccctgacgcgccgcaaacagcgttccggcaaaaccggcaaacgcggcacttatggtaaaggcagtcagcttgatacgacgcgggcttaagcccaggctacggcaggcgatttcatcttcacgcaacgcttcccacgcacgccccagcggcatccgcagcaggcggttaatgacaaacaggcttagcaccaccagcagcaacgccaccaggtagaggaagatgacacgatcggagggatcgtatttcaggccaaagaaattactgaacgtgtcccagccgccttcacgagcggtacggctgaactcgagtccgaagagtgtcggtttcgggatctgactgattccgttcgggccgccggtaatttcggtgttattgagcagcaatatgcgcacaatttcgccgaaaccgagggtaacgatcgccagatagtcaccgcgcaaacgcagcaccggaaaaccgagcaggaagcccgccgccgctgccattaatccagcaatcggcaggcaggtccagaagcccaagccgtaatagtgattgagcagcgcaaaagtgtaagcgccgatggcgtaaaaaccgccgtaccccagcaccagcagaccagaaagaccaacaaccacgttcagcccgagaccgaggataatgtagatcatggtcagggtggcaatatccaccgtcccgcgactaaccataaacggccacgccaccgcaagcaccaacagcgccacgaggaacagtttctgcttcaccgtggagccatcaatggcgggcagaataaacttcggtccggaaacgcttttcaaccctttctggaaagccggtcgcaaaagctggaagaaaaagaccaccgccgtgccgataaacacccactgccaacggacatcgctagccgtgtcgaccaccagtttggtgccatccagctccagttgcacgcccataaagacgcccgccagcacaaagaacatcgcggcagagagcagcgccattgcaatatgcatcggtttcatactttctctacctccgggcgacccagaataccggtcggcatcaccagcagcaccagaatcagcagggcgaaactgaccacatctttatattccgtactcagataggcagaagagagcgcctccgcaatccccagaatcaggccgccaatcatcgctcccggaatgctgccaatcccaccgagcaccgccgcggtaaaggctttcatcccggccataaagccgatgtaggggttaatgacgccgtagaactgaccgagcagcacacccgccaccgccgccatcgccgcgccaatcacaaaggtcagcgcaatcacccggtcggtgttaatgccaagcagactcgccattttcagatcttccgcgcaggcacgacacgcgcgacccatgcgggaatagcgaatgaaaatcgtcagcgccagcatggcgaggaaggtaacaatccagatcaccgcctgcatggtggtaatagaggcagagaagttttcgctatgccccaccacccactgaccgttaaacaggctcggcagcgccacgtcgcggctaccttcggtcaggctgacgtagttttgcaggaagatggacataccgattgcagagatgagtgcaatcaggcgcttagagttacgcaccgggcggtaagccacccgttcgatactccagccgtaggcgctggcaatgacgattgcgccgacgaatcccgcagctaccagcagccagccggtatcaatgcccatcatcatcagcgcggcgatgatcataaaactgacgtagctgccaatcatataaacctcgccgtgggcgaagttgatcatgccgataatgccgtaaaccatggtgtagccgatggctatcagcgcgtaggtactgcccagcgtgacgccgttaaacatctgctgcaagaaatacaaaaactgctcagacataaggtaacctttctaaacccgcccgcattttacgggcggtgggatgatcacttggctgccgtggaactaccgtcggcgtgccactggaagacaccaaaatcaaatcccttaagatcgcctttttcatcccagttcagcggcccaatcacggtgtttgcaccgttagcttttaaatctttcaccagcgccagcggctcatcgctgccggtacgctcaagggcagtcgccagagattgcaccgccgcgtaggtgatccagacataaggcccggacggatctttcttgtctgctttcagcgcatcaacgatgccctggtttgccggatcctggtcatagcgttttggcatagtgaccaacatgccttcggcggcatcaccggcaatgttgctcaagctcgcattacccacaccttccggccccataaactgggttttcaggccaacggaacgggcctggcgcagcatctgccccatttccgggtagtaaccgccgtagtaaacgaagtcgatgttttcttttttcaggcgggcgatcagcgcggagaaatctttctccccggcggtaataccgtcgaagaagacgacgttggcgttagccgctttcagcccgtcctgcacgctacgcgccagcccttcgccatactgttgtttgtcgtgaatgatggcgatgcgctggggcttcaccgtctcaagaatgtattttgccgccgttggcccctgggaagagtccagcccggcagtacgcataatgtgttgataaccgcgttgggtcagctccgggttggtcgctcccgggctgatcatcagaataccttcgtcttcatagatatcactcgcaggctgggtagaagaagaacacagatgaccaataacgtatttaatgccgtcattaacgattttgttggcgaccgcaacggcttgtttcgggtcgcatgcgtcgtcatattccacgccaaccagtttatcgcccttaattccccctttggcattaatgtctttaattgcctgacgcgcgccgttaaattccatatcgccccactgggcaatcgggccggacatcgcgccgacaacggcgactttaatatcgtcagccatagcggtgtgactaattgccagtgcaatcatccctgcgatgatagttttcgcattccgtttcatagtcaaaaatccccattcgtgatgttgtgttgctttgtttttatgtgttaacaaatcagactgttctttttttatactgcactgtttttgcctgtctgattaaggggttagcgcagtattttgtgataatagcgattaaaatccctatttttcagtcgattaagaacagataatattctgaatttattgatagataaacagaaaaaagtgcctttgtcagcataaaataacggcacaaagggcggaataattcactatcattcaggggattatgctggacatttttcattctctaatgttttaattttgtaattattgctgttaaaaaattaatcacctgccaaaagaaataaaaaagagaaagcctccgattaaattatttcgctacactggttccacttttgtgatttacacgggttacccatgaagctgaccatcattcgattagaaaaatttagcgaccaagaccggattgacctgcaaaagatctggccggagtattccccttccagcttacaggttgacgataaccaccgtatctacgccgcgcgttttaacgagcgcctgctcgctgccgtgcgggtaaccttaagcggcaccgagggagcactggattccctgcgcgtgcgggaagtcacccgccgtcgcggtgtggggcaatatctgctggaagaggttttgcgtaacaatcctggcgttagttgctggtggatggcggatgcaggcgtggaagatcgcggtgtgatgacggcgtttatgcaggcgctggggtttacggcacaacagggcggctgggagaagtgttaatcgtcaagtttgatttcaaaagtgatattgcctgatgcgctacgcttatcaggcctacaatgtgtgttgcaatttactgatttctttggatcttgtaggccggataaggcgtttacgccgcatccggcatgaagcaacgtactcgatattagcaatttggcggcaacccaaagttgccgattaatgattacttcgcatcggtcgccgtgccgttggcgtgccagtcaaatacgccgaactcaaagcctttcagatcgcctttctcatcccaggtcagcggtcccattacggtatccacggagttcgctttcaggtatttggcgatttcagccggatcgtcagactgattcaggcccgcctgcaaagattgcagcgcggcgtaggtggtccaaacgaatgcgccacttgggtcctgttttttcgctttgatcgcgtcaacaatgggtttgttcgccggaacctgatcgtagttcttcggcttggtcaccagcagcccttccgcactttcgcccgcaatgttagacaggctaacgttagccacaccttccggccccataaactgagttttcagccctgccgcgcgtgcctgacgcaggatttgccccatttccgggtgataaccgccgtagtaaacgaagtcgatattctcttttttcagacgcgccaccagcgtactgaaatctttttccccggcggtgatgccatcaaagaacaccacgtttgcattgcctttcttcaggccgtcctgcaccgctcgcgccagaccttcgccgtattgctgtttgtcgtgaacgatagcaatacgctgcggtttcactttctcaagaatatatttcgccgccgtcggcccctggtcggagtccaggccggtggtgcgcaggatcagctgatagccacgggcggtcagctccggcgcggttgccgctggggtgatcattaaaatgccttcgtcttcgtagatgtcagacgcaggctgcgtactactagaacagaggtgaccaatcacatatttaatgccgtcgttaacgactttgttcgccaccgcaaccgcctgtttcgggtcacaggcatcgtcatattttacgatttgcagtttgttgcctttaatgccgcctttagcgttgatatccgcaaccgcctgctctgcgccggtaaactcctggtcaccgtactgcgcaaccggaccggacattgcgcccacgaccgcgactttaatatcttctgccagagccatattgctgaatgccagcgcgatacatcctgccagtaacgctttaccctttatgttcatcctgagaatccccattcttctggttattacgtgtgttgtgatgttgtttttcagcactttatttcgttttatgcatgactacccgtgctttagcagcatactctgctaaaacatacccgatttttatgatattggaatagctattttgacagtttattaacaatctgcgtggggattggcgttttgccggaggggaaattgattattacagaggcccaaaaaacaaaaaccccggactctcatccagggttctctgcttaatagcggaaattacgcttcaatggcagcacgcaattttttcatcgcgttcttttccagctggcgtacacgctcagcggaaacgccgtaacggtcagccagttcctgcaacgtggacttgttgtcttcgtccagccagcgcgcacggatgatgtcctggctgcgttcgtccagaccctgcatcgcgtcggtcagacggtttgccgcctgctcttcccagttatcatcttcaatgccgtcggcaaagttagaacttttatcctgcagatagagcaccggagccatcggctggctgtcggaatcgtcgtcggaagacaggtcaaaggtcatgtcctgtgccgccatacgactttccatctcacgtacgtctttgctggttacgcccagttcacgggccaccatttcgacttcatcctggttaaaccagcccagacgctgcttggttttacgcaggttgaagaacagtttgcgctgcgctttggtggtcgcaactttgacgatacgccagttacgcagaacgtattcgtggatctctgctttgatccagtgaacggcgaaggagaccaggcgcacacccacttccgggttgaaacggcgcactgctttcatcaggccgatgttaccttcctgaatcaaatccgcctgtggcaggccatagcccgcataattacgagcaatatgaacaacaaaccgcaggtgagacaggatcagcgttttagctgcttccagatcgccatggtaatgcagcttttcagccagcgcccgctcctcgtcagcgctcaacatcggccacgcgttagctgcccggatgtaggaatccaggttgccaactggggctaaagctaaactttgcattttgtcagtcattcaaatcctctcaatcgatatcttctggcgcttcagtggtagcaacaactgtgccagagcttaagagcaacgaggttatcattcactgttttatcagaccgtgattttatccacaagttcaatgcaagcttgtgaataaattacgcacaaaatgtgacatagagatgaaataccgggaagagacaacggggtctctttccctgctacggaacccattgcagggaaagagtataacacgcttttattattcaggcgtaaagtggcgtaaatgttgtaccgtggcaagccacgctgccacccagccaatcatgctgcataccagcagcaatagcaggcattcatcgaaacttaagccattgatatcaaacttcgttccgaaaacctgtgccacttccgcaaccgcgctactcaatcgcagcaccagaatttcactcaaaattaaactcaacaatgcgccagaaaatcccagcagtgcgccaccatacaggaacgggcgcaggatgaatccatctgtcgcaccaatcagtttctgtacgttaatggagtcacggcgagcaaagatactcagacgcacactgttaccgatgacgaggaacacggccgccaccatcaacacgccgatcatcgcgctaacgcgcccgaccagcccggtcaacgccgccagacgggcaaaccagctgtcatccatccgcacttcgtcaatgccgttaatctgcgtgatacgatcacgcagcgtattcagactttccgtcccctggaaatcgagtttcgggatcaccaccgccactgccggaagcgggttttcttccagcatatccagcgcaccaccaaaaccagaccagttacggaactcacccagtgcgtcttcacgagaaagatagttcactttctccacgccttgctcggcctgcaactgtgccaccacgcccgcagcagcgtcatcgtccagcgttttttgcagataaacagtgatttgcggactcggataatactgcgtcgccgcctggttaacgtttttgtacaccatataacagacgctgggcagcgtcagagaaatggcgataaccatcaccgttaaaaacgtggcgaacggtttgcttttcagatcctgcaatgcgccgtggaaggcatagcgcacctgttcgttgaaaacgttggttttgcgatttaccggttttgggctggatttcgcgcgttttggtgcgttacgaccgccgtcgccactgccgccgacgcttttacggaagcgatcaagacgcccgccaaactgccgaatatgattgattgcatcgcgcttattcatggcccacgcctccatgcaagtgaccatcgctcagggtgagcatgcgataggaacgccggctgatcaggttgatgtcgtgcgttgccatcaatacggttaccccaacgcggttaaactcttcaaacagacgtaaaatgccttcgctcagcgcgtcgtccaggttaccagtcggttcgtccgccagcagtaccgcgggcttgttcaccaccgcgcgggcaatgccaacacgctgttgttcaccgccgctaagctgaatagggaagttcttcgctttgtccagtagcccgactttatccagcgccgcgctcacccggcgacgaatatcgtcaccgctggcaccggcgataatcagcgggatcgccacgttatcgtagacagtacggtccatcagtagatggtgatcctggaaaatcatgccaatctggcggcgcagaaacggaacttcacggtttttcagacgcgtgatgtcatggccgctaaaccagattttcccggcgctgggccgctcaatcccacagatcagcttcaggagggtacttttccctgcgccggaatgaccggtcagaaacgccatctcacccggctgcatatggaacgtaacgccctgcagcgcctgtctcccaccgagataagccttgctgacatgttcaaagcgaatcattgttaatcctctcgggcaaaaagtgcctctataaagtcgtccgccttaaacggacgcaaatcctcaatacgttcgccgacaccaatgtagcggatagggataccaaactggtcagccacgctgaaaattaccccgcctttcgccgtgccgtccagtttcgttagcgtgatgccggttaagccaacggcttcatggaacagtttggcctggcttaccgcgttctgcccggtgctggcatcaatagtcagcataacttcatgcggcgcttcaacgtcgagtttcttcatcacgcggacgattttcttcaactcttccatcaggtggcttttgttctgcaggcgtccggctgtatcggcaatcaggacgtcgatattacgcgctttagctgcctgaatggcgtcgaagataacagaggcggaatccgccccggtatgctgggcaatcaccggaatattgttgcgctgaccccagacctgaagctgttcaaccgcagctgcacggaaagtatcacccgccgccagcatcacgcttttaccctgctgctcaaactgacgcgccagcttaccaatcgtcgtggttttacccacaccgttgacgcccaccatcaggatcacaaacggcgctttgccttcaacattcagcggctcatcgactttcgccagaatctcgcccatctcttctttcagcaggccatagagcgcctcggcgtcacgaagctgcttgcgggatgcgccttccgtcagattggtgataattttacgtgtggtttccacacccacatcggcgatcaaaagctgctcttccagctcctcaaacagatcatcgtcgatttttttaccgcggaacaggctgataaatccggaaccgagattttctttggtttttaacaggctgcgtttcaggcgcgcgaaaaaaccttctttggtcggtttttcctgctcctgagcgatttcttccaccggctgctcttcttctgccggaggaaccaccatcaccgcctcttctgccgcttcggcagccagcgccgtttccagctcttcgtcggtaatttcttctttagccgcttcttcttccgccgcttcgacaatctctacggtttccgcttcagcctgccactcttctgggctaaccgcttcggcgttgacgtcttccggcaacggcagctcttcacgttcgatagccactggctccggcgtttcttctacgaccggttccggctgtgcaacgacttccgcttcaggctgcgctttttcactttcagcaacctgttcagtgacttccacaacgtcggcagcaaaagtttccgcctcggcttcagtatgcgcttgcggctgctcttcaacggcttgttcagaggccttcacaggctcttgcgcctgaacgatttcttctacaaccggttgttcattctgaacttctgtctctttttccggggtctgctctttttgaccaaagcccagccaggaaaaaaagccacgttttttttctttcgccatttgcgactacactcctcgctgttgcttcatggcacagcgttaacgctatgtacatagcagctaaaaaaatgatgaaatagtctatcacttaacttaattcacatcaccgcctgcaagtatgtgttatctggcggattgagcaatttatcatgaaaaaaccgaatcattccggcagcggccaaatccgcattattggcgggcagtggcgaggccgtaaactcccggttcctgatagcccaggtctgcgccccaccaccgaccgcgtacgcgaaacgttgtttaactggctggctccggtcattgttgacgcccaatgtctggattgcttcgccgggagcggcgcgctggggctggaagcgttaagccgctacgctgcgggggcaacgttgattgagatggatcgcgcggtttctcagcagttaattaagaatctggcgacactaaaagcaggcaatgcacgcgtggtgaacagcaacgcgatgagtttcctggcgcaaaaaggtacaccgcataatatcgtgtttgtcgatccaccgttccgccgtggcttgttagaagagacgataaatttactggaagataacggctggctggctgacgaagccctgatttatgtcgaaagcgaagtcgaaaacggtctgcccactgttccagcaaactggagtttacatcgggaaaaagtggcgggtcaggtggcttatcggctgtatcaacgcgaagcacaaggagaaagtgatgctgattaatattggtcgtttgttaatgctctgcgtttggggatttttaatcctcaacctggtgcatcccttcccacgcccgctgaatatcttcgttaacgtggcgctgatttttaccgtgctgatgcatggtatgcagctggcgctattgaaatccactttaccgaaagatggcccgcagatgaccaccgccgaaaaggtacggattttccttttcggcgtgtttgaactgctggcctggcagaagaaatttaaagttaaaaaataaccttattgttcgcctacaaagctgacaaagcgcgttcctttatagctcagcgtacctttatcgcccactgtcagggcgtggtactgctgggcgtcgaggcgaaacgtctgctccattcctccgctttgcggtttgaagcttgcctcatagcgtatactggtgcctgccggagtcacttcctgctggcggctacggcgatcgttaatcggtttttcccgcttgttgctcaccaccaccagcttttgctggagcggagccatatcattatcagctttttcccgtcgctgttgcataaaacgaaagcttgcggcgacgacaattaagccaatgataacaataaagaaaagaggtggtttgctcatctttatccctcatcggaaaatgcggaaataagcataccctgccagttatggtgttgtcatccgtccaccctcgccactaaactggaagcaagaccgtaggcattccgcttacgaaaaaataacgaattcaaggaactaagatgctttggagctttatcgctgtctgtctttccgcatggctatctgtggatgcaagctatcgtgggccaacctggcaacgctgggtgtttaaaccgttaacccttcttctcctgctgttactggcctggcaagcgccgatgttcgacgccattagctatctggtgctggcagggctgtgcgccagtctgctgggcgatgcgctaaccctgttgccacgtcaacgtctgatgtacgccatcggcgcgtttttcctcagccacctgctgtacaccatctatttcgccagtcagatgacgctctctttcttctggcctctaccactggtgctgctggttctgggtgcgctgttactggcgattatctggacgcgcctggaagagtaccgttggcctatctgcacgtttatcggcatgacgctggtgatggtgtggctggcaggtgaactgtggttcttccgtccgaccgctccggcgctctctgcgtttgttggcgctagcttgctgtttatcagtaactttgtctggctggggagccactatcgccgacgcttccgtgcggataacgcgattgctgcggcctgctactttgccggtcacttcctgatcgtccgcagcctgtatctctgataaaacttgactctggagtcgactccagagtgtatccttcggttaatgagaaaaaacttaaccggaggatgccatgagcactcctgacaatcacggcaagaaagcccctcaatttgctgcgttcaaaccgctaaccacggtacagaacgccaacgactgttgctgcgacggcgcatgttccagcacgccaactctctctgaaaacgtctccggcacccgctatagctggaaagtcagcggcatggactgcgccgcctgtgcgcgcaaggtagaaaatgccgtgcgccagcttgcaggcgtgaatcaggtgcaggtgttgttcgccaccgaaaaactggtggtcgatgccgacaatgacattcgtgcacaagttgaatctgcgctgcaaaaagcaggctattccctgcgcgatgaacaggccgccgaagaaccgcaagcaagtcgcctgaaagagaatctgccgctgattacgctaatcgtgatgatggcaatcagctggggtctggagcagttcaatcatccgttcgggcaactggcgtttatcgcgaccacgctggttgggctgtacccgattgctcgtcaggcattacggttgatcaaatccggcagctacttcgccattgaaaccttaatgagcgtagccgctattggtgcactgtttattggcgcaacggctgaagctgcgatggtgttgctgctgtttttgattggtgaacgactggaaggctgggccgccagccgcgcgcgtcagggcgttagcgcgttaatggcgctgaaaccagaaaccgccacgcgcctgcgtaagggtgagcgggaagaggtggcgattaacagcctgcgccctggcgatgtgattgaagtcgccgcaggtgggcgtttgcctgccgacggtaaactgctcagtccgtttgccagttttgatgaaagcgccctgaccggcgaatccattccggtggagcgcgcaacgggcgataaagtccctgctggtgccaccagcgtagaccgtctggtgacgttggaagtgctgagtgaaccgggagccagcgccattgaccggattctgaaactgatcgaagaagccgaagagcgtcgcgctcccattgagcggtttatcgaccgtttcagccgtatctatacgcccgcgattatggccgtcgctctgctggtgacgctggtgccaccgctgctgtttgccgccagctggcaggagtggatttataaagggctgacgctgctgctgattggctgcccgtgtgcgttagttatcagtacgcctgcggcgattacctccgggctggcggcggcagcgcgtcgtggggcgttgattaaaggcggagcggcgctggaacagctgggtcgtgttactcaggtggcgtttgataaaaccggtacgctgaccgtcggtaaaccgcgcgttaccgcgattcatccggcaacgggtattagtgaatctgaactgctgacactggcggcggcggtcgagcaaggcgcgacgcatccactggcgcaagccatcgtacgcgaagcacaggttgctgaactcgccattcccaccgccgaaagtcagcgggcgctggtcgggtctggcattgaagcgcaggttaacggtgagcgcgtattgatttgcgctgccgggaaacatcccgctgatgcatttactggtttaattaacgaactggaaagcgccgggcaaacggtagtgctggtagtacgtaacgatgacgtgcttggtgtcattgcgttacaggataccctgcgcgccgatgctgcaactgccatcagtgaactgaacgcgctgggcgtcaaaggggtgatcctcaccggcgataatccacgcgcagcggcggcaattgccggggagctggggctggagtttaaagcgggcctgttgccggaagataaagtcaaagcggtgaccgagctgaatcaacatgcgccgctggcgatggtcggtgacggtattaacgacgcgccagcgatgaaagctgccgccatcgggattgcaatgggtagcggcacagacgtggcgctggaaaccgccgacgcagcattaacccataaccacctgcgcggcctggtgcaaatgattgaactggcacgcgccactcacgccaatatccgccagaacatcactattgcgctggggctgaaagggatcttcctcgtcaccacgctgttagggatgaccgggttgtggctggcagtgctggcagatacgggggcgacggtgctggtgacagcgaatgcgttaagattgttgcgcaggagataaggcaaaccgatcgcaacattgagcgcgatcggtcccctcgcccctctggggagagggttagggtgaggggaaaaggcggcatcgaagccaatcagcccctatcaaccgcctttacgaatcaaataacgataaggcagtccatccgtctctttagcaaccagttcgtgttccataaaggtacaaaacccaggaatatcgcgggtagtggccggatcgtcggcgataatcagcaacgtttcgccaggctgcatattgcgcacggttttgcgcaccatcatcaccggttccgggcagcgcaggccaagcgcgtcgagtgtgtggtcagggctggaaaagagatcggtcattttcttctcatcacttaaaaaaacggcgctagtttacgccctgtgagtccgtaagcaaactaggttaacgattgcgtgaaaattaaccattgcattgtcaacgtaaagcagtatcatgcggcggctcgaaaaaagggtaagcacgttattatgttaaggtaacagacgtgtcgtacgtattgggttccctcaccccaatggttaatcaaaaaggtacaatatgaacgttttcagccaaactcaacgctataaggcgttgttctggttaagcttatttcatctgctggtgatcacctccagtaactatctggttcagcttcccgtctccattttgggtttccataccacctggggcgcgtttagctttccgtttatttttcttgctaccgacctgaccgtgcgtatttttggcgcaccgctggcccgacgcattatcttcgcggtaatgatccctgcgttattaatctcctacgtcatcagcagcctattctatatgggttcctggcagggattcggcgcactcgcccacttcaacctgtttgtcgcccgtatcgccaccgccagtttcatggcctacgcgctggggcaaatcctcgacgtgcacgtttttaaccgcctgcgtcagagtcgccgctggtggctggcaccgacagcgtccacactgttcggtaacgtcagcgacacgctggcctttttcttcattgccttctggcgtagcccggatgcctttatggctgaacactggatggaaatcgcgctggtcgattactgtttcaaagtgttaatcagtatcgttttcttcctgccaatgtatggcgtattactcaatatgctgttgaaaagactggcagataaatccgaaatcaacgctttgcaggcgagttaaaggttcgttatcagagttgtgataagatggatgaatgagccgttatggccgtttatcgaaaggaagaagtcaatgcgcaatctggttaaatatgtcggaattggcctgctggttatggggcttgcggcctgtgatgataaagacactaacgctacggcgcagggtagcgtcgcggaaagtaacgctaccgggaatcccgtcaacctgcttgatggcaagttaagtttcagcctgccagcggatatgaccgaccagagcggtaagctgggaacgcaggccaataacatgcatgtctggtccgacgccaccgggcagaaagcagtcatcgtcatcatgggcgatgatccgaaagaagatctggcggtgctggcgaagcgtctggaagatcagcaacgtagccgcgatccgcagctgcaagtggtaaccaataaagccattgagctgaaaggtcacaaaatgcagcagttagacagtattatctccgcgaaaggccagacggcgtactcttccgttattctgggtaacgtgggtaatcaactgctgaccatgcaaattacgctgcccgctgacgatcagcaaaaagcgcagaccaccgcagaaaacatcattaatacgctggttattcagtaagttttaagaactactggcggcctcagggacgtgttccggaggccgtttttttaatcgccacgtcagtaataacgcgattgcgaccagtcccgccgccgccagataaatcaccggtacgcccgcccagctcatcaccagcccagccagtggtccagtcacgccaaggcttaaatccataaatacggtgtaagttgccagcgccgccccctgattttgctgcggaaccgcttttaccgccactacacccaatgccgggaacaccaggctaaacccggcccccgccagtaagacgccgattttcgccatccacggcatagtcgccacgccaaccagtagcaggccgattatctcaacgctaaagcaaatcatcgctacgtttaagccaccgatacggttaatgccgttagggaataacaaacgcgtaccgacaaacgcacagctaaacagcgtcagcgcgaaagccgcaccgtcccaacctttagcgtcataaaacagcgtgataaaggtggcgatgacgccaaatccggcggaagccagtgccagcgccataccgtacagccagacgcgcccaagcaccgcgcgaaacggcagcggtttgcctttactggcttttaccgtcggacgcgggatcgccaacaaaatggccaccagcgccacgcccataatgattaacgctaacgcctgcaagccgccccagtgataaaacacgacgcctaacggcgcacccatcgccatcgccccgtaagtgacaatgccgttccagctaatcacccgcccgatatgcaggctgccaaccacgccaacgccccatagggtgcttcccgttccggcaaaactttgcccaatcccaaggatgacgcgccccaggcaaagtaataacaggctgatgacaggcagactggcggttaatcctgccgtcagataccccagaccgctcaaaaagcagccgcataaaccgaagacgacaatctttttgggtcccaggctatcggcgtaacgtccggcatgagggcggctcagcaaggtggcgaaatattgcaggctgataaccaatcctgcccagaaggcgctaaagcccatcacatcatggacatagcccggtaatacagcgagcggcaacccgatggtgaggtagctggcgaagttaaacatgactatagagacaatgcgcaaattcaggcgcaatccgtttagcgcgggttcggctacgggttcgggcatgaggatcaccacatttttacaacagtgtttcatttttaccacgtgctgacgtgaaaatcagcagtaagaatcagaatattgctggcgtgactcccgctacacttaatacaaaaagtcacaaggaagccccaatggaaacccctcaacccgataaaacgggcatgcacattctgctcaagctggccagcctggtagtgatcctcgcgggcattcacgcagcggcagatatcattgtgcagctgttactggcgctgttttttgccatcgtcctcaacccgctcgtcacctggtttattcgtcggggagtacaacgccccgttgccattacgattgtagtggtggtgatgctgatcgcactaaccgcgctggtcggcgtactggcggcaagctttaacgaatttatctctatgctgccgaagtttaataaggagctgacgcgcaaactttttaaattgcaggagatgttgccttttcttaatttgcatatgagcccggagcgaatgctgcagcggatggacagcgaaaaagtggttaccttcaccacagcgctaatgaccgggctttccggggcaatggcgagcgtgcttttgctggtgatgaccgtagtttttatgctgtttgaagtgcgccacgtcccttacaaaatgcgttttgcgctgaataatccacagattcacatcgcgggattacaccgcgcacttaaaggcgttagccactatcttgcattgaagacgctactcagtttatggacaggtgtcatcgtctggctggggctggagctgatgggggtgcagtttgcgctgatgtgggcagtactggcgtttttgctcaactacgtgcccaatatcggcgcggtaatttccgccgtaccgccaatgattcaggtgctgctgtttaatggtgtttacgaatgtattctggtcggcgcattgtttttagtggtccatatggtcatcggcaatattttagaaccacggatgatgggccatcgcctggggatgtccaccatggtggtatttcttagtttgttaatttggggatggctgctcggcccggtagggatgctacttagcgtgccattaaccagcgtgtgtaaaatctggatggaaaccaccaaaggcggtagcaaactggcgattttactggggccgggcagaccgaaaagtcggttaccgggatgaggcgacaagtgatacgatacgcactttcattttccattaaacgttggccctgatatgtatcggatagttctggggaaagttagcaccttaagcgcagctccactgccaccgggtttacgcgagcaagcaccgcaaggtccacgacgcgaacgctggctggcggggcgtgcattgcttagccacacgctttccccgctaccggagatcatctatggcgaacaaggcaaacctgcatttgcgccggaaatgccgctatggttcaacttaagccatagcggtgacgatatcgccctgctgttgagtgatgaaggcgaagtcggctgcgatatcgaagtgattcgcccgcgcgccaactggcgctggctggcgaacgccgtattcagcctcggggaacacgctgagatggacgccgtgcatcctgatcagcaactggaaatgttctggcgcatctggacgcgcaaagaagccatcgttaaacagcgtggcggcagcgcctggcaaatcgtcagcgtagacagcacctatcactccagcctgagtgtcagccattgtcagcttgaaaatttaagccttgcgatctgcacccctactccctttacgctcaccgccgacagtgtgcaatggatcgatagtgttaactgatccgcccacccgactgcccatctattgatccagaacaggtaatcagtatgacgaatacttaaaatcgtcatacttatttccgccatctattttaatccattggggttaccatgctctccacactccgccgcactctatttgcgctgctggcttgtgcgtcttttatcgtccatgccgctgcaccagatgaaatcaccaccgcctggccggtgaatgtcgggccactaaacccgcacctttacacgcctaaccagatgttcgcccagagcatggtttatgaaccattggtgaaatatcaggcagacggtagcgtgatcccgtggctggcaaaaagctggactcatagtgaagatggtaaaacctggaccttcaccctgcgtgatgacgtgaaattctccaacggtgaaccgttcgatgccgaggcggcggcagaaaacttccgcgcagtgctcgataaccgtcaacgtcacgcctggctggagctggcaaaccagattgttgatgttaaagcactcagtaaaacagagctgcaaattaccctgaaaagcgcctactatcctttcctgcaagaactggccctgccccgtcctttccgttttatcgctcccagccagtttaaaaaccatgaaaccatgaacggaattaaagcgccgattggcaccggaccgtggattttgcaggaaagcaaactgaatcagtacgatgtcttcgtccgtaacgaaaactactggggcgaaaagccagcgattaaaaagatcacctttaacgtcatcccggacccgactacccgcgcggtggcgtttgaaactggcgatatcgacctgctgtacggaaacgaagggttattaccgctcgataccttcgcccgctttagccagaatccggcttaccacacccaactgagtcagccgatcgaaaccgtgatgctggcgctcaataccgccaaagcccccaccaacgagctggcagtacgtgaagctcttaattacgcggtaaacaaaaaaagcctgattgataacgcgttgtatggcacccagcaggtcgccgacaccctgtttgccccttctgtgccctacgccaacctcggcctgaaaccgagccagtacgatccgcaaaaagcgaaagcgttgctggaaaaagccggttggacgctgcctgcgggcaaagacatccgcgagaaaaatggtcagccgctgcgcattgaacttagcttcatcggcaccgatgcgttaagcaaaagcatggcggaaatcattcaggctgatatgcgccagattggcgcagatgtcagcctgattggcgaagaagagagcagtatctatgctcgtcagcgcgacggtcgttttggcatgattttccaccgcacctggggcgcgccatatgatccacacgccttcctcagtagtatgcgcgtaccgagtcacgctgacttccaggcacagcaaggattagccgacaaaccgctgattgataaagagatcggcgaagtgctggcgacccatgacgaaacgcaacgtcaggcgctgtatcgcgacattctgacccgtctgcatgacgaggcggtttatctgcctatcagttacatcagtatgatggtggtaagtaaaccggagctgggtaacatcccctacgcgccgatcgccaccgaaattccgttcgaacagattaaaccggtgaaaccttaatgttgcgttacgtattacgccgctttctgctgctgatcccgatggtgctcgccgccagcgtgatcatttttctgatgctgcgcctcggtaccggcgacccggcgctcgattatttgcgtctgtctaacctgccgccgacgccggagatgctggcctctacccgcaccatgctgggactggatcagccgctgtacgtccagtacggcacctggttgtggaaggcgctgcatcttgactttggtatcagtttcgccagccaacgcccggtactggacgatatgctgaacttcctgcccgccacgctggaacttgcaggtgcggcgctggtattaattctgctcacttccgtaccgctcggtatctgggcggcgcgccatcgcgaccgtctgccggatttcgccgtacgtttcatcgcgtttcttggcgtgagcatgcctaacttctggctggcgtttttactggtgatggcgtttagcgtgtatctgcaatggctacccgcgatgggttacggcggctggcagcacatcattttgcctgcggtttccattgcctttatgagcctggcgattaacgcgcgtttactgcgcgccagtatgctggacgtcgccggtcagcgtcacgtcacctgggcgcgtctgcgcggcctgaacgacaaacagaccgaacgtcgccacatcctgcgcaatgccagcctgccgatgatcaccgccgtggggatgcatatcggcgaactgattggcgggacgatgattatcgaaaacatctttgcctggccgggcgtcgggcgctatgcggtgagcgcgatttttaaccgtgactatccggtgatccagtgctttacgctgatgatggtggtggtttttgtggtctgtaatttgattgtcgatttgctcaacgccgcgctggacccgcgcattcgtcgtcatgaaggagcgcacgcgtgaactttttcctctcttcccgctggagcgtacgcctggcgctgatcattatcgccctgctggcgctgattgcgctcaccagccagtggtggctgccgtatgacccacaggcgattgatttgccgagccgcctgcttagcccggatgcgcagcactggctgggcaccgatcacttaggtcgcgatattttcagccggctgatggcagcgacccgcgtgagcctcggtagcgtaatggcctgcctgctgctggtgctgacattagggctggttattggcggcagcgccgggttgattggcgggcgcgttgatcaggccaccatgcgcgtcgccgatatgtttatgaccttcccgaccagcattctgagcttctttatggttggcgtgctcggcaccgggctgaccaacgtaattatcgccatcgccctgagccactgggcgtggtatgcacgcatggtgcgcagcctggtgattagtctacgccaacgcgagtttgtgctggcgagtcggctttccggtgcgggccatgtgcgggtgtttgtcgatcatctggcaggcgcggtgatccctagcctgctggtgctggcaacgctggatatcggccatatgatgctgcacgtcgcggggatgtctttccttggcctcggtgtgaccgcgccgaccgccgaatggggcgtgatgattaacgacgcgcgccagtatatctggacccagccgctgcaaatgttctggccggggctggcgctgtttatcagcgtgatggcctttaacctggtgggtgacgcactgcgcgatcatctggaccctcatctggtgacggagcacgcacactaatgccgcaacagattgaactacgtaatatcgcgctacaggccgcgcagccgctggtacacggtgtaagcttaaccctgcaacgcgggcgcgtgctggcgttagtcggcggtagcggcagcgggaaaagtttaacctgcgccgcaacgctgggcattttgcccgctggcgttcgccagacggcgggggaaattttagccgatggcaaaccggttagcccttgcgccctgcgcggcatcaaaattgccaccatcatgcagaacccgcgcagcgcctttaatccactgcacaccatgcacacccacgcgcgggaaacctgcctggcgttagggaaacccgccgatgacgctacgcttaccgctgccatagaagcggtggggctggaaaacgccgcgcgcgtgctgaagctgtacccgttcgagatgagcggcggcatgttgcagcgcatgatgattgcgatggcggtgctgtgtgaaagtccgtttatcatcgccgatgaaccgaccaccgaccttgacgtggtagcacaggcgcgcatcctcgatctgctggaaagcattatgcaaaaacaagcgccgggaatgctgctggtgacccatgatatgggcgttgtggcgcgtctggcggatgacgtggcggtgatgtctgacggtaagattgtcgaacagggcgatgtagaaacgctgtttaacgcccccaaacatacagtgacgcgcagcctggtttccgctcatctcgccctctacggtatggagctggcaagttgacctaatacggtatggagctggcatcatgactttacttaacatctccggcctttcccatcactatgcgcacggtggatttaacggaaaacatcaacatcaggcggtgctgaataacgtttccctgaccctgaaaagcggcgaaaccgtcgccctgctggggcgcagcggctgcgggaaaagtaccctcgcgcggttgctggtgggtttagaaagccccgcgcaggggaatattagctggcgtggcgaaccgctggcgaaactcaatcgcgcccagcgtaaagcgttccgccgcgatattcagatggtatttcaggactccatcagcgccgtgaatccgcgcaaaaccgtgcgcgagatcctgcgtgaaccgatgcgccacctgctaagtctgaaaaaatccgaacaactggcgcgcgccagcgaaatgctgaaggcggtcgatctcgatgacagcgttctcgacaaacgcccaccgcagttaagcggcggccagctccagcgcgtctgcctggctcgcgcgctggcggtcgaaccgaaactactgattctggatgaagccgtttctaaccttgatctcgtgttacaggcgggtgtcattcgcctgctgaaaaagctacaacaacagtttggcaccgcctgcctgttcatcacccacgacttacgcctggtagaacgcttttgccagcgggtaatggttatggacaacggacaaatcgtcgaaacccaggtggtgggagagaaattaaccttttcctctgacgccggacgtgtgctacaaaacgcggtattacccgcattccccgtgcgccgtcgcaccacagaaaaggtttaacgcaaatgcaacgagtcaccatcacgcttgatgacgatttactggagacgctggacagcctgagccagcgtcgtggttataacaaccgttccgaagctatccgcgacattctgcgtagcgccctggcgcaagaggccacccagcagcacggcacgcaaggtttcgcggtgctgagctatgtgtatgaacacgaaaaacgcgacttagccagccgcattgtctccacccagcatcatcaccacgacctctccgtcgccacgctgcatgtgcacatcaaccacgacgactgtctggaaatcgccgtgttgaaaggtgacatgggtgacgtgcagcattttgccgatgacgttatcgcccagcgcggcgtgcggcacgggcatttgcagtgcttgccgaaggaagattgagttacgccattgtcccaatcgtcttcctgaatcgcagcagcgcaatggtgaaaaatgcgccgccaattgccatcagcgtcagaaactgcggccagacgatttcgaatccggcaccccggtagaggatggcctgcgcgaggctaacaaagtgtgtcgtcggcatggtcagcataatgtcctgcaccatctgcggcatactttcgcgcggcgtggaaccaccggaaagcatttgcagcggcagcagcaccagaatcaccagcagccccagttgcggcatactacgcgctatcgtccccataaaaatgccgatactcgtggtggcaaacagactgagcgccacgcccagcataaacagcgggatgctgccttcaatcggtacgcccagtacacctttcaccatcagcaccaggcttaatccgcttaccaccagcaccaccagccccatgctccagatcttcgccatcatgatctcaaacggcgttatcggcatcaccagtaagtgttccaccgtgccgtgttcacgctcgcggatcagcgcgcttccggtcaatacaatcgccagcatggtaatgttgttgatgatcgccatcaccccgccaaaccacgcgggatcgaggttcgggttaaagcgcatccgggtttccaggcttaccaacggttcgctgttatcacggtagcgcgcgacaaagctgttcacttcaccgttgataatattctggatatacccattgccggtaaatgcctggctcatgcgcgtggcatcgacgttcacctgaatatccggctggcgtccggcgaggacatcacgctgaaaattaggcggaatatttatcgcgaaggtatagcgtccggcgtccagtccggcatccatctcatcggcggtgatcatctccggtggcaaaaaccacggacgatagaagctgttaacgatccggttgcttaactggctttgatccatatcggcaatggcgatcggcgcgaggttcaagcttcctggcgtaacggtcgcactgctatacacgctcaccgtaaagctgaagacaatcagcgtcagcatcgctttatcaccgagcagactgcgcaactctttgatacccagattaaaaatattgcgtaaatggcgcatcatccctcctgttttttcagcagcaggatacttaagcccatcaccagcgggatggctatcagtaacgggataaaaagttgccacaaatcagtcagatccagcgctttgctgaacgtcccgcgggcgatagtcagaaaatgactggtcgggtaaacctcgccgatccaacgtccaggcccttccaggctagctaccggatcgatcatcccggaaaactgtgtcgccgggatcaacgtgataatcgccgttccgaaaatggcggcaatctggcttttcataaaggtggagatcagcagccccattccggtggcaatgatgatatacagcagcgccgccagggtgagcgtcaggaaactgcctttatgcggtacgccaaacacaaacacgctcaggccgcagagcaggaaaaagttcagcatccccagcgcgatgtatggcaactgtttaccaagcaaaaattcactacgcgtggtgggggtcacgtaaaggttgataatgctcccaagctctttttcccgcaccacgctaagggcgcttagcatactcgggatcatcatcagcagaagcgggatcaccgccggaacaatcgctggcaggctttttacgtccgggttatagcgatagcgcgtctcaatattcatcagcccgctttggctggcgggtgtgctttgtcggctcgccacatcctgtaaccagctctggtgcatggcctgcacgtaaccttttaccgtttcagcacggctcggcatcgctccgtcgatccagacgccgagttccacaggcgtaccacgcgcgatatcgcgcccgaaattgggcgggatctcaatcgccaccgtgatatcgcccgcacgcatccgacgatcaagctcgtcataactggtgagcggcggctgttcgataaagtaacgggaaccggagaggttgagtgtccacgcctggctactgacggtctggtcgcggtcgagcaccgcaaagcgcaggttttccacatccatactgatgccgtaacccattatcagcatcaggatcaccgttcccatcagcgccagcgtgctacgtactggatcgcgtcgcagttccagcgcttcgcggcggctgtagctaaacagacggcgcaggctaaatccctgacgcggcgcgtgggtggtgtcgtgtaccacgggcggcgcttcggcttcgttgctctgccctgccgcttcctgcaaataggcgataaatgcctcttccagactggcggctccgcgtttctcaaccagttcctgcggtgtaccgctggcaagcacttttccggcgtgcatcagactgatgcggtcgcaacgttccgcttcgttcataaagtgggtggagatgaagatagtcactttgtcctggcggctgagatcgaccatcaactgccagaacatatccctcgccaccggatcgacaccagaagtaggctcatcgaggattaacatctccgggcgatgaatcaccgccaccgccaggctaagccgctggcgaatgccgagcggcaaactctccggcagaatatcttcaacgtcgttgagcttaaaacgctcgctcatttcagccactcttgcgggaatttccgcttccgggatgtgaaacaaacgggcatgtaactcaaggttttgccgcacggtgagttcgttatagaggctaaacgcctggctcatatagcccacccgacggcgggtatcgatatcttttggatcaaccggttgcccgaacagccacgcctcaccttcgctggcgggcagcagtccggtgagcattttcatggtggtggatttaccgcagccgttgctaccaagaaaaccaaaaatctccccgcgtggaatgcggaaattaacgtgatcaacggcaacgaaggaaccaaaacgcatggtcagatcgcgcgcttcgatggcaatctctgcgttttcaggttgatacggtgggatcactaccgcctgatgcgcctggcgttgcgcttgcggtaacagatttataaatgcttcttccagcgtagcgctttgcgtttgctgccgtagctcttcggcgctgccagttgccagcacttctccggcattcatcgctaccagccagtcgaagcgttcggcctcttccatataggcggtggcgaccagcacgctcatattgctctgccgctggcgaatactgtcgatcagatcccagaactgggagcgggagagcgggtcaacccccgttgttggctcatcaaggatcaacagttccgggtcgtggattaacgcgcagcacagcccaagtttttgcttcatcccgccggagagtttccctgccggacgatcgcgaaacggtgctaacccggtgctggtcagcagctcattgattcgcacttcccgctccgctttgtcgtgaccgaacaggcgagcgaaaaaatcgacgttttcatacacgctcaaggtgtggtagaggtttttgcccagcccctgcggcatccaggcgatgcgcgggcagacgtcgcggcgatgcttcgggtcgcgcatatcgccgcccagcaccatcacattgccctgttcaatgacgcgggcaccggaaatcaagctcaacaagctgctcttcccgacgccgtccgggccaatcagcccgaccatacagcgggccggaatatcgagagtgatattgttcagcgcaacggtttttccataatgctggctcacgcccgccagttgcgcgacaggcgggacgggaaccagttccagatgcgtcattgcggcaacctcaccacgaggtcgtcaggccacggaagttcttcattcacccgcacccacgctacgcccggcaaaccggttttgacatattccagatgctgctggagtaattccggtgggatacgcgctttgacgcggaacatcagtttcagccgttcatcgctggtttcgacggtttttggcgtgaactgggcgacactggcgacaaaactgatggttgcaggaatacgcagatctggcgcggcatcgaggatcagccgggcttcaccgcccagtttcagcgtgcccgcctgttcggttggcaggaagaaagtcatatagacgtcgctgagatcgaccatattcagcacccgaccgcctgccgccagcacttcgcctggctcggcaacccgatactgcacgcgtccgtcacgcggggctttcagttcgctgtcatcgatatctgcggcaatgcgccgttcagtggcttgtgccgcttcgacgcgggtttgcgcctgaatgatattggtgcgtgccgcttctatagccgctttagaagcgcttacctgagctttcgcgctttccagcgcagctcgggcgctctcagcggcggcgcgatcgtcatccagctgttgcgcagaaatagcccctcgttgggccagactacgggaacgcgtatgacgttttgctacggagtccagttctgcctggcgttgattaaccaggctctgtgcggcacgagtttcgctttgtcgttgctccagcaaagcctgcgcggcagcaacggcgctttgtgcctctttgatttgcgcgatggcttccagtcgctgttcctgcaacacgcgagtatccatcttcgccagcacttcaccttcgcgaacaaacttgccttctttcaccagaatggtgtcgatacgcccggcaattttgctggcaatatccacttccgtcgcttcaatgcgcccattactgacagcaaagccttccggcacacctgccgggcgcaacagccaccacgccacgatagccgccaccgccagtaacccgacaacccaccacgccagatggcgcttactcttatccataatcgacccgccataatccctgtaagcaaacgacgcgtgttacaactgccgccgaacgacgttcagcggattcttccatccgggataagaaggaaacggcaaatacgaccagcgcgcagagcattgagcgccaacggggaaggcttagtgaaaacgggtagtaatgttgtcatcatcagcattcctggccgtaaatgaaacacgcatactcataagtgtgatctataaaactggctgacaaaacggtatccatcctgttggatagcgtttcacgcctgttcagttgcaggaacagagcattcctttttacgttttatcaacagtctcaaccagatagtaacattaatattcatgttgtctatggttcagagctgtaacattgtgcgccttctaatcaaaggcataagtccatttctgtttttttcatgctggtaagacttccagggagtggttatctcaggccctgcaccagggttaatttggcaattatgcatgctgaacattcttccagcatgtttactgtcacgggcgttaagacctaaaactgtccccgtttcgcctatgcgttctcttccaccatttccgttatgtgcaacaacttgatttatacctaacatttgactacatgctaatagtgcttcaagtttaggtctgtaatctgtgctaacagaaaaataacgattaaaggatcgacaagagatagcccggctagttttaaactttttgccattaattatagcatgatgctttttattgataattgccgctaattcgaccggatcgagagcattggtcatttcatcaatagagactgttatcggtcctataatgtaacgttttcgctgatcatcaaaagttatcccatgatgatttgccattattttgtatttggggtcatagaaacatacaggataatcttttatcccagagtaggtatcctcatcgagtggtttcatacgcgtgaagttctgcatatagttaccattgcaattcgtttcatgatttccagctaatacatgaacattttcattgatactcattatgcgttttaacaaatcgatgataaattgatcaccacagatattgctaaatcgatcgccggtttggtcgcccagaaacgtacatggcgtcacagcgtctttattaataactaaataaggctgaagactttctaaaataatgtctcttctgttcaggatactgattattgtattaacattagtgttaagttgctcattaaagttctcccttagcaatacgttgagaacttcatcttctatattaagcaactggctaaggaaattttctccttcagccatgattcccaaatgtcccgttgcgaaaagcgcgaacaaaactgcaccgacactgccatcggtatcaccaaaataggttggtctggtacttgtgggatcaacgggtaaacaattggagaaatagattctgtcagcgaactggggttttatcattgtttcgaatttaatatcagatacattatattggcttattttccagttccagatgggtttgtagctctcagtaactgcaacatcattagcattatcatttactgtcatattattaagtaaataaacaatactgcaccaattaatatcggtattatcaagagagcaaccgtaatttttgctattaattgtcacaataaactgataattattattcctacgtagaatatgagcacgcatgccgcttagcatactatatttttcactatgatccgtttgtatggtaaaactaattttgtcatcttgaatagattgttggaaccgttctatttgccaatcatctattttttccacaacctcaccgagcattgtcctggcaatactacttatatcatcacctataccatttgcaatatacccaaacagttctttagtgaagttggtaacatgctcttgcaccatatcatttgttgcgattgtcgttgtactgtcgttagtgcctgccacagttccaattttcatattttacctcatattatttaccgcgaggaatacatagttaacattttatcttatgacatacacctcatgttcgatgggaaaataattatattttgcacaaatcattcagcctcaaagcataatatgaaatttcttatctcatagcagagaaagtccctaaagattgtagaggcgtcatcagaacatgcctctacaatcgattaagaaaacctatgaaatactggcaggattaaaaagacataccaccgtattcatggagttttaatgtagttgaaaacaactaagcccactggaataaattattttattatttttatcacgtgcttccttcagggaatttagccccataataccattatcaaattgttgattatgatctaccccgggcccatgatgcccatatttttgtctaatgtatttgctggggtcttcacctttgagtgtctccccacatatgaagatacgttcacgtgctggtctgaaatcagtagtgttatcaaaataattagcatatacaggtgtgggtttcaaagtattgcttcggattagatggaatagaggatcatccatgtgttctttatgttttttattaaaaatattggctaattcctcaggatcagtaggatttttcatctgattaaatggaacctgcaaagcacgctgacaataacatttttttcttcatctcttattattccgtgatgactggttaaaacttgcctttcactgtcataattacaaacatcgagcgttttaattaagttatacgtatcaccggcagagagtttatgatttgctagtcgtgcagtatagttaccattaaaattgatttcatgatttccagccagaacgacgacatttttattaatacggctatctttattaccctccatatttcgcatagaatttagcaaagtaaggatatatttatcaccaaaaatagtactaaatctatcgcctgtatgatccccaaggaagatacaaggggttatcgcatcgtcctttaaaaaaacatgttgatgcaactcattcaagatcatgtctctcgtatttaataaatcgtagagcactttattatttttatgtttgtatgcagaactagccatctcttcgtgttttaataattcacataataaactccaacccttttccctgatgcctatatgcccactaacgagcaatgcataaagtacagcgcctactcttccatctgtatcgccaaaataagccgtgttggcattttgtgggttaatcacaccacactgtttatagaagtctattttactaaacacagatttaacatagctatcaaacttttccttagtaaacgtctctttagagacatcccaacgccagtcaggtttgaaattaccactaagaagagtaaagaaatttctcgctatgatagaaagcccatcaactttataaattatatcacttttatctccagaggaattaataaaataataaccgcccttacactcaacagtaacggtaatgggagagcttaattttaacacatggttattgtctggtataattgtaaagataaacgtatcagtagtattgtcggcgaatctattatattcttgaatatctatagaaggttcactattataaaaccatactttctccatctggtgactacgatcatttaccttccagtgaccatgttgcaggaaatagatgatatgcaggccaaaatcgttatctatttggctatcattatccagtttatcaaattcaactatctttgcacgatgtgttttatcaaccttgccatggtgttgatgactgttaactttatcactatgcttatcttgatggctactagagatgtttctaatctgattgtcaattgctttcataaataacctgtgatatttttgaattgtttgtaacaaaataaatgatacttgtctgaaaaacagatttacgacgatataaaataataatacttatatgttcgctgattttaagcaccgagactatccggtcttttaccaaataatgaagaataatccctccctggaagataattgtaaaaaacaacagcataagaattaatcttaggataaatttttatttatcatggccttttgaacgctgaaaagtagcgctctgcaaagtaaaccccgctatagttatgctatgcatttgtctttaatgatatctcgtcattatattaacaggatgaaattatcattaatgcatatttcaatattagcagggatacctgaggagtttaaagtgaacatatatatcgggtggcttttcaaattaatccctttgattatgggcttaatttgtatcgcgttaggtggctttgtgctggaaagtagtgggcaaagcgagtatttcgtcgcgggtcatgtgctgatttctctggcggccatatgcctggcattattcactaccgcatttattatcattagccagctcacgcgcggcgttaatacgttttacaatacattgttccccattattggctatgcggggagtattatcaccatgatatggggttgggcactgttagcaggcaatgatgtgatggcagacgagtttgtcgccggccatgttattttcggcgttggtatgattgccgcctgtgtaagcacggtggcagcgagttccggtcactttctgctcattcccaaaaatgcagcggggagcaagagcgacggaacaccggtacaggcttattctagtttaatcggtaactgcctcattgccgttcccgttttactcaccctgctcggtttcatttggtctattacgctgttacgtagtgctgacataactccgcattatgtcgcgggtcacgtattgcttgggttaaccgcaatctgtgcctgtctaattggccttgttgccacaattgtccatcaaacacgtaatacgtttagtactaaagaacactggctgtggtgttattgggttatttttctcggcagtatcacggtactgcaggggatatacgtcttagtcagttccgatgcaagcgcccgactggctcccggcattattcttatttgcctcggaatgatctgttacagcatattcagtaaagtctggctactggcactggtatggagacgtacctgtagcttagccaacagaataccgatgattcccgtcttcacctgcctgttttgccttttcctggcaagctttcttgcggaaatggcgcagaccgacatgggatattttattcctagccgagttctggtcggtttgggagcggtatgctttacgttgttcagtatcgttagtatattagaagcgggttctgctaaaaaataattgcaacgtaccggataaaaccagcgttgaccatttgcgtaacgctggtttttcttaggcatcatgaaataacgcagcattaatgcatagtggttaagtataaaaaacagcaaagttactgtttttttcaacctgttcatatttcataaagatctggccactgagtgagttttcaatcacctttccatccaccttatattaagcatggagggtttcagttcacgggctcattagaaaataatcacaagataaccactatcaaaattagctcatttttaatgcgactctaataattttcatctttaggaaataggtcaggagctctttgctgcaatcaaatcctgcgcacaagcccacgcactgctccacgcccactggaagttatagccccccagccagccggtgacgtccatcacttcgccgatgaagtacagcccaggcactttgcgcgcttccatcgtccgactagagagttcgttggtgtccacgccgccgagcgtcacttcggcagtgcgatagccttcagtgccgttgggttgtacgcgccagtcggtcaatgtgctaatcagtgcctgttggtcacgcacgttgagctgttttaggctaacatccgggatttgcccgagttgctgtaagcgttcaaccaaccgcttcggtagatgaaccgccagtgtgtttttcaggctttgattcggatgtgcgttacgctgctcattcaggaaggtttcgaggtccacatccggtagcagattgatgctgacaaattcccccggttgccagtagctactaatctgcaacaccgccggtccagacaagccgcggtgggtgaagagtaagttctcacggaaaacggtgccgttttcagcggtaatcacggaaggcaccgccacgcccgccagcacctgtaactcttcgagcaacggtttatgcagagtgaatggcaccagacccgcgcgggtcggcagcacgttgaggccaaattgttcggcaatcttataaccaaacgggctcgcgcccagccccggcatactcagcccaccagtcgcgatgaccagcttttcgcaaccgacagtcatgccgttcagatcaagcgtgaagcctgtttcatccttcgccacactcagcacttcgctacgcaatctgaaggtcacattgcccttctcgcactcatccaccagcatgtcgacaatctgctgcgcggagtcatcgcagaagagttgccctaacgttttctcgtgccaggcgatgccgtgtttattgaccagatcaatgaaatcccactgggtaaaacgtgcgagtgcagacttacaaaaatgcggattctggctcagataagcgcctggttcgacataaaggttggtaaagttgcagcgcccaccgccagacataaggattttgcgccctggttttttaccattatcgatcagcagaacccggcgtcctgcctgacctgccagcgcagaacagaacatacccgccgcaccagcgcctataataatggcatcaaacctttccacgttgcgctcctcttagaaaaaacgggcgtgaattgtaaagattcctcagtggtcgcaccagcatcaatattactaaaaggaagtatttgcctgaattatataagataattattttttgagtgaaatccatacagggggcaaatcaaaaaaagtctatatttcactttgcccgcgccgcgaaagtcactgataatgcgccgcgttcatgtcctcaaaatggcgtaacgtcctatgctacatttgtttgctggcctggatttgcataccgggctgttattattgcttgcactggcttttgtgctgttctacgaagccatcaatggtttccatgacacagccaacgccgtggcaaccgttatctatacccgcgcgatgcgttctcagctcgccgtggttatggcggcggtattcaactttttgggtgttttgctgggtggtctgagtgttgcctatgccattgtgcatatgctgccgacggatctgctgcttaatatgggaagctctcatggccttgccatggtgttctctatgttgctggcggcgattatctggaacctgggtacctggtactttggtttacctgcatccagctctcatacgctgattggcgcgatcatcgggattggtttaaccaatgcgttgatgaccgggacgagtgtggtggatgcactcaatatcccgaaagtattaagtattttcggttctctgatcgtttcccctattgtcggcctggtgtttgctggcggtctgattttcttgctgcgtcgctactggagcggcaccaagaaacgcgcccgtatccacctgaccccagcggagcgtgaaaagaaagacggcaagaaaaagccgccgttctggacgcgtattgcgctgatcctttccgctatcggcgtggcgtttagccacggcgcgaacgatggtcagaaaggcattggtctggttatgttggtattgattggcgtcgcgccagcaggcttcgtggtgaacatgaatgccactggctacgaaatcacccgtacccgtgatgccatcaacaacgtcgaagcttactttgagcagcatcctgcgctgctcaaacaggctaccggtgctgatcagttagtaccggctccggaagctggcgcaacgcaacctgcggagttccactgccatccgagcaataccattaacgcgctcaaccgcctgaaaggtatgttgaccaccgatgtggaaagctacgacaagctgagccttgatcaacgtagccagatgcgccgcattatgctgtgcgtttctgacactatcgacaaagtggtgaagatgcctggcgtgagtgctgacgatcagcgcctgttgaagaaactgaagtccgacatgcttagcaccatcgagtatgcaccggtgtggatcatcatggcggtcgcgctggcgttaggtatcggtacgatgattggctggcgccgtgtggcaacgactatcggtgagaaaatcggtaagaaaggcatgacctacgctcaggggatgtctgcccagatgacggcggcagtgtctatcggcctggcgagttataccgggatgccggtttccactactcacgtactctcctcttctgtcgcggggacgatggtggtagatggtggcggcttacagcgtaaaaccgtgaccagcattctgatggcctgggtgtttacccttccggctgcggtactgctttccggcgggctgtactggctctccttgcagttcctgtaatcgtacgcaccaaaacgagcgggtcagctggcccgcttcagattgtgacatagtgcgctttgttcatgccggatgcggcgtgaacgccttatccggcctacaaaaacatgcaaattcaatagattgcagagattatgtaggcctgataagcgtagcgcatcaggcaattttgcgtttgtaatcagtctcgagcgggtcagtttactggcccgctttttttatgcgttattattgctgaagtgcttaatgccaaatcatcaatgcaatcaggctgaccaccaccagaccacacaatgcgctggtcagaataaactgccgacgcacccgctcacagcggcgaataaattcatcatcgtgatgatcgcgataacgttgggcatagatataccaaacgagacgcacctgtttgttgggttggccatgattggtaaaaaagccccctccatcaacatattgatagagcaatggatcgcagttacgcagtaccactaacaacgcgcgtagactactgaaatagcgcgccatgttaacaatgcaaacgacacataaagcccaaaataatgcgacggtgcttatcatacctcctccccggcgacctgcccgcggagttccaccccggggctaccgctcccgatacgctgccaatcagttaacaccaggtcctggagaaaccgcttttgtggtgaccaacatacgagcggctctatagatagtgtaggagatcaggttgttttttttccagaaggttaaccactatcaatatattcatgtcgaaaatttgtttatctaacgagtaagcaaggcggattgacggatcatccgggtcgctataaggtaaggatggtcttaacactgaatctttacggctgggttagccccgcgcacgtagttcgcaggacgcgggtgacgtaacggcacaagaaacgctagctggccagtcatcgacaactttatggaaggagtaacactatggcttataaacacattctcatcgcggtcgacctctccccggaaagcaaagttctggtagagaaagcagtctctatggctcgcccctacaatgcgaaagtttctctgatccacgtagatgtaaactactctgacctatacaccgggcttattgatgtgaatctgggtgatatgcagaaacgcatctctgaagagacacatcatgcactgaccgagctttccactaatgcaggctacccaatcactgaaaccctgagcggcagcggcgacctgggccaggttctggtcgatgcaatcaagaaatacgatatggatttggtggtttgtggtcaccaccaggacttctggagcaaactgatgtcttccgcacgtcagctgatcaacaccgttcacgttgatatgctgattgttccgctgcgcgacgaagaagaataatcttccctctacgacgtgttcctgaacgcccgcatatgcgggcgttttgctttttggcgcgccttgttacctgatcagcgtaaacaccttatctggcctacggtctgcgtacgcaatcaaaatccccagccaatacaacatttaacaccatcatattttccatcattagtgtgatcatctggttattttctgttgtaatagtgtattaatctattcaccgcatcaatattaagaatctctgacagatgtaaactttttcgcgcgttatcccttacgcgttcatacttttcaggatggtattggaaggttaataaatatgaatacaacaacacccatggggatgctgcagcaacctcgcccatttttcatgatcttttttgtcgagttatgggagcgattcggctactacggcgtgcagggcgtactggcggttttcttcgttaaacagcttggattcagccaagagcaggcttttgtcacttttggtgcttttgctgcgctggtctatggcctcatttccattggcggctatgtcggcgaccacctgctggggaccaaacgcaccattgttcttggagcacttgtgctggcgattggctacttcatgaccggcatgagcctacttaagcctgacctgattttcatcgccctggggactatcgctgtcggtaacggcctgtttaaagctaacccagccagcttgcttagcaagtgctatccgccgaaagatccgcggcttgatggcgcattcaccctgttctatatgagcatcaacatcggcagcttgatagcgttaagcctggcccctgtgatcgctgatagattcggttatagtgtcacctacaacctgtgcggggcggggttaattatcgcattactggtttacatcgcctgtcgtggaatggtgaaagacattggttctgaacccgacttccggccaatgagcttcagcaaactgttgtacgtgttacttggcagcgtggtgatgatcttcgtatgcgcatggctgatgcacaacgtagaagtcgccaatctggtgctgattgttctctccatcgtcgtcaccatcatcttctttcgtcaggcattcaagctggataaaaccgggcgcaataaaatgtttgtcgcctttgtcctgatgctcgaagcggtggtgttttacattctctacgcccagatgccaacaagcctgaacttctttgccatcaacaacgtgcatcatgaaattctcggtttttccatcaacccggtcagcttccaggcgcttaacccgttctgggtggtactcgccagcccaatactggcaggcatttacacgcatctgggtaacaaaggcaaagacctcagcatgccgatgaaatttactctcggcatgtttatgtgcagtctgggctttttgacggcggcagctgcgggaatgtggtttgcggatgcacaagggctgacaagcccatggtttatcgtgctggtgtacttattccagagcttaggtgaactgtttattagcgcccttggcctggcgatgattgctgccctggtgccgcagcatttgatgggctttattctcgggatgtggttcctgacgcaggctgccgcgttcttgctgggcggctatgtggcaacatttaccgcggtgccggacaacattaccgatccgcttgagacgttgcccgtctataccaacgtgtttggtaagattggtctggtcacgctgggcgttgcagtagtgatgctgttgatggtgccgtggctgaaacgcatgattgcgacgccggaaagccattaattattcttgcagaaagcagggtagcgttatcgctaccctgttttagttttacactggcgtacctgcatagatatcaaagcgatgccctttagtgactaccgcgtttggcgtggcgacattcgccagcggtggcgcgtagtccgggcgctttaccaccacgcgtttggtcgccagcaagcgtgcaggctccagtaatccatcggcatcaagatccggtcccaccaggctctgaaagacacgcatctcttttttcactagcgcgcttttctgcttatgcgggaacatcgggtcgagataaaccacctgcgggcgcggggtaatatcagtcagcgccgtcaggctggaggcgtgaattaactgcaaccgctcctgcaaccagccgccgatttccgcatccgcataaccacgcgccaggccgtcgtcgagtagcgcggcaaccactggattacgctccagcatccgcacgcggcagccgacactagccagtacaaaggcatcgcgcccaagtcctgcagtggcatccaccacatccggcaaataatcgcctttaatgcccaccgctttcgccaccgcctcaccgcgaccaccgccgaatttgcgtcggtgcgccatcgctccgccaacaaaatcaacaaagatgccgccaagttttggctcatcacgcttgcgcaattccagatgttccggcgttaacaccagcgccatcaggttgtcttcatcgtgctccagcccccagcgggccgccagaacagataaggcaccgtctccggtgcctgtttcatcaattaagcagattttcactgaatgatcagcccttaatgccgtaatgctccagcatcgcatccagctgcggttcacgaccacggaagcgtttgaacagatccatcggctcttcactaccgccacggctcagaatgttgtcgaggaagctctgcccggtttcacggttgaaaatgccctcttcctcaaagcggctgaaagcatctgccgccagtacgtcagcccacaggtagctgtagtaacctgcggcataaccaccggcgaaaatatggctgaaagcgtgcgggaaacggccccaggacggagatggcaccacggcaaccagtttcttgatttctgccagagtttcgaggatttttgccccctgatccgggcggaactcggcatgaaggcggaaatcaaacaggccgaactccagctgacgcagaataaacagcgccgcctggtagttcttcgccgccagcattttatccagcaactctttcggcagcggttcgccggtttcatagtgaccagagataaacgccagcgcctccggctcccagcaccagttttccataaactgactcggcagttcgaccgcatcccacggcacaccgctgataccggaaacaccagcggtttcgatgcgggtcagcatatggtgcaggccgtgaccgaactcgtggaagagggtgatcacttcgtcgtgagtgaacagcgccggtttaccatttaccgggcggttgaagttacaagtcaaatacgcgaccggtttttgcaaagaaccatcagctttacgcatctggcctacgcagtcatccatccacgccccgccgcgcttgttttcacgggcatacagatcgaggtagaagctaccgcgcagttcgttattttcgtcatacagttcgaagaaacgtacatccggatgccagacatcaacatctttacgctctttagcggtgatgccgtaaatacgcttaaccacttcaaacaggccgttaaccgctttgttttccgggaagtacggacgcagctgttcgtcactgatgctgtagaggtgctgtttttgtttttcgctgtagtaagcgatatcccacggctgcaactcatcgacgccaaattcggctttggcaaaggcacgcaattgcgccagctctttttcgccttgtggacgcgcgcgttttgccagatcggttaagaaatccagcacctgctgcgggttttctgccattttagtggcaagggatttaaaggcgtagttttcaaagcccagcagttgcgccagttcgtgacgcagcgcgaggatctcttccatcaccttgctgttatcccatttaccggcgtttgggccttgatcggaggcgcgggtgctgtaagcgcgatacatctcttcacgcagagcctggttgtcgcagtaggtcattaccggcaagtagcttgggatatccagcgtcagcaaataaccttccagctctttcgcttcggcctgggcttttgccgcagccagcgcgctttctggcatccccgccagctccgcttcgtcggtaacgagtttggtccagcccattgtcgcatcgaggacgttgttgctgtactggttgcccagttcagaaagacgggtcgcaatttcgccgtaacgctgctgtttctctttcggcagacctatgccagagagttcaaagtcgcgcagtgcgttatcaaccgctttcttctgcgccgtgttcagcgtggcgtaatgatcgccatcgcgcaggtcgcgatacgctttatacagcccttcatgttgccctacccaggtgctgtattcgctcagcagcggcagggtttgttcgtaggcttcacgcagttccgggctatttttcacgctgttcaggtggctgaccggggagaagatacgccccaacacatcgtccacttccgccagcggctggcagagattttcccaggtgtacggtgccccttgcgctactacgcgctccacgttttcgcggcagtcgttcaatgccttagtcacggctggaacgacatgttccgggagaattttagaaaacggaggcaattcaaagggagtcagtaacggattcgtcattcgcgcagtcctggttaaagaggttaaggaagcgctcaacaggcgctttacataatgtgtgtagcatggggttaagtgtagtgaatttcaatgagaaacgttacgctttcgcggcggcggcctcttttcggtatactgtcctgatacgcttttgtgcgccccgaatacgggccgatttttacttaccggaacacctttacccatgctcagttatcgccacagctttcacgctggcaaccacgccgacgtccttaaacataccgttcagagcctgatcatcgagagcctgaaagagaaagataaaccgtttctctatctcgacacccacgcaggggccgggcgttatcagttaggcagcgaacatgccgagcgtaccggcgaatatctcgaaggcatcgcccgtatctggcagcaggacgatttgcccgcagaactggaggcgtacatcaatgtggtaaaacacttcaaccgtagcggtcagttgcgttactaccccggtagcccgttgattgctcgcctgctactgcgtgaacaggacagcctgcaactgaccgaactgcacccgagcgattacccgttgttgcgttctgaatttcagaaagatagccgtgcgcgtgtcgaaaaagccgacggtttccagcagcttaaggccaaactgccgccggtttcccgccgtggtttaatccttatcgacccgccgtatgaaatgaaaactgactatcaagcggtggtcagcgggatagcagaaggttacaaacgtttcgccactggtatttacgcactgtggtatccggtggtgctgcgtcagcaaattaagcgcatgatccacgatctggaagcgaccggtattcgcaaaattctgcaaattgaactggcggtactgccagacagcgatcgccgtggcatgaccgcttccggcatgattgtgattaacccgccgtggaaactggaacaacagatgaataacgtgctgccgtggctgcacagcaaactggttccggcaggcaccgggcacgccaccgtaagctggatcgtgccggagtaattgcagccattgctggcacctattacgtctcgcgctacaatcgcggtaatcaacgataaggacactttgtcatgactaaacactatgattacatcgccatcggcggcggcagcggcggtatcgcctccatcaaccgcgcggctatgtacggccagaaatgtgcgctgattgaagccaaagagctgggcggcacctgcgtaaatgttggctgtgtgccgaaaaaagtgatgtggcacgcggcgcaaatccgtgaagcgatccatatgtacggcccggattatggttttgataccactatcaataaattcaactgggaaacgttgatcgccagccgtaccgcctatatcgaccgtattcatacttcctatgaaaacgtgctcggtaaaaataacgttgatgtaatcaaaggctttgcccgcttcgttgatgccaaaacgctggaggtaaacggcgaaaccatcacggccgatcatattctgatcgccacaggcggtcgtccgagccacccggatattccgggcgtggaatacggtattgattctgatggcttcttcgcccttcctgctttgccagagcgcgtggcggttgttggcgcgggttacatcgccgttgagctggcgggcgtgattaacggcctcggcgcgaaaacgcatctgtttgtgcgtaaacatgcgccgctgcgcagcttcgacccgatgatttccgaaacgctggtcgaagtgatgaacgccgaaggcccgcagctgcacaccaacgccatcccgaaagcggtagtgaaaaataccgatggtagcctgacgctggagctggaagatggtcgcagtgaaacggtggattgcctgatttgggcgattggtcgcgagcctgccaatgacaacatcaacctggaagccgctggcgttaaaactaacgaaaaaggctatatcgtcgtcgataaatatcaaaacaccaatattgaaggtatttacgcggtgggcgataacacgggtgcagtggagctgacaccggtggcagttgcagcgggtcgccgtctctctgaacgcctgtttaataacaagccggatgagcatctggattacagcaacattccgaccgtggtcttcagccatccgccgattggtactgttggtttaacggaaccgcaggcgcgcgagcagtatggcgacgatcaggtgaaagtgtataaatcctctttcaccgcgatgtataccgccgtcaccactcaccgccagccgtgccgcatgaagctggtgtgcgttggaagcgaagagaagattgtcggtattcacggcattggctttggtatggacgaaatgttgcagggcttcgcggtggcgctgaagatgggggcaaccaaaaaagacttcgacaataccgtcgccattcacccaacggcggcagaagagttcgtgacaatgcgttaaatgttaaagggctaagagtagtgtgctcttagcccttaattacgtttccgctatcagttcagaagctgaagcagaaagcggatcagttccagcagcgcaattaacgcccctagaacgatgattgctttatcaatcacccgttttctccatgcgatggagtgagaatgcatccgcttactcatccactgcctgtcacggcgcatgtctcattgttagataagaactctctcactccggccagagcatcagttaacggcaccacccgtacttctgaccaggactttgaaagcgtttatgcgcattgccagagtgaaaatgcctcagagctaactggataatcatacagtacatgcaggttataaaaccagcacgtccttgcaatagtttcagtatggtattagcattgatgcgttagatgatggctatctcactccagtcagagccaccaactcagggctggaaagtaaaaaaccgacgcaaagtcggtttttttacatccggattcggacaaggcttaatatgacgatgacccagtgaaagtatataaatcgtcactgcgatatataccgaagtgctccctccgccagctgaagaaatcgctaattcttgcaatgttagccactggctaatagtattgagctgttagataagaactctctcactccagccagagccaccaactcagggctggaaagtaaaaaaccgacgcaaagtcggtttttttacgtcctgattcagacctcctttcaaatgaatagccaactcaaaattcacacctattaccttcctctgcacttacacattcgttaagtcatatatgtttttgacttatccgcttcgaagagagacactacctgcaacaatcaggagcgcaatatgagttttctgttacccatccaattgttcaaaattcttgctgatgaaacccgtctgggcatcgttttactgctcagcgaactgggagagttatgcgtctgcgatctctgcactgctctcgaccagagccagcccaagatctcccgccacctggcattgctgcgtgaaagcgggctattgctggaccgcaagcaaggtaagtgggttcattaccgcttaagtccgcatattccagcatgggcggcgaaaattattgatgaggcctggcgatgtgaacaggaaaaggttcaggcgattgtccgcaacctggctcgacaaaactgttccggggacagtaagaacatttgcagttaaaaatttagctaaacacatatgaattttcagatgtgttttatccgggaggcattatgttactggcaggcgctatctttgtcctgaccatcgtattggttatctggcagccgaaaggtttaggcatcggctggagtgcaacgctcggcgcagtactggcgttagttacgggcgtggtccatccgggtgatattccggtggtgtggaatatcgtctggaacgcgacggctgcgtttatcgccgtcattatcatcagcctgctgctggatgagtccggcttttttgaatgggcggcgctgcacgtcagtcgctggggtaatggtcgtggtcgcttgctgtttacctggattgtcctgctcggtgctgccgttgccgccctgtttgccaatgatggcgcggcgcttattttgacaccgattgtcatcgccatgctgctggctttagggttcagtaaaggcactacgctggcgttcgtgatggcggccggattcattgccgataccgccagcctgccgcttattgtctccaacctggtgaatatcgtttccgctgatttctttggcctcggctttcgcgaatacgccagcgtgatggtgccggtggatatcgccgcgattgttgccacgctggtgatgttacatctctattttcgcaaagatattccgcagaactacgatatggcgctgctgaaatctcccgcagaagcgatcaaagatcctgctacgttcaaaactggctgggttgttttactgcttctgctggtgggatttttcgtcctggaaccgctcggcattccggtgagcgccattgcagctgtgggcgcgctgatattatttgtcgtcgctaaacgcggtcatgcgattaatacgggtaaagtcctgcgcggtgccccctggcagattgtcatcttcagcctcggcatgtatctggtggtttatggcctgcgcaatgccggattaacggaatatctttctggcgtactcaacgtgctggcggataacggcctgtgggccgcgacgctcggcaccggattcctcaccgccttcctctcttctattatgaacaatatgccgacggtactggttggcgcgttgtccattgatggcagcacggcatctggcgttatcaaagaagcgatggtttatgccaatgtgattggctgcgatttgggaccgaaaattaccccaattggtagcctggctacgctactctggctgcacgtacttagccagaagaatatgactatcagctggggatattacttccgtacagggattatcatgaccctgcctgtgctgtttgtgacgctggctgcgctggcgctacgtctctctttcactttgtaatgagatactgatatgagcaacattaccatttatcacaacccggcctgcggcacgagccgtaatacgctggagatgatccgcaacagcggcacagaaccgactattatccattatctggaaactccgccaacgcgcgatgaactggtcaaactcattgccgatatggggatttccgtacgcgcgctgctgcgtaaaaacgtcgaaccgtatgaggagctgggccttgcggaagataaatttactgacgatcggttaatcgactttatgcttcagcacccgattctgattaatcgcccgattgtggtgacgccgctgggaactcgcctgtgccgccctagtgaagtggtgctggaaattctgccagatgcgcaaaaaggcgcattctccaaggaagatggcgagaaagtggttgatgaagcgggtaagcgcctgaaataaagcggcgatatcccccccacaggttgttagaaaagtgcgctttatttatgtcggatgcgacgctggcgcgtcttatccgacctacaaagttatgaaaattcgatgaatagtatgttatttgtaggcctgacaggcgtagcgcatcaggcgattttgctatttacacagtactccctgcgtgagattccaattatcgcgtccagcatggtgtatcagtgagctgcttagttatcagcgatacagcgcagtagtttaaagacgtactggattatgatttatcagtggtttacacaacaaattattaaataattataagataccttaacccattttattattacacatctaaaacatcacaaaaaaaatcacttcacacactatcagagaacataataactttttaaaatgagcgcattttgatagttgttaacgatttcctttacgatactatcactaccctttttttacacacaaatattaccgggtggagataaaagggaaatcaaaggtaattatatcaggaagatataacgcattacatttattgtgtgtagaagaaaatccattcctgttctaattatccaatttaaacatcttagcataaaacaaatgatgaataaggaattttatattgattattagcactttataatcattgaataaaaatagattttatgtacttttaaaacaatgcactatattatggggtgatggatattcatgtcacgccccaaaattaactgagttcacctaaacagaaaggatataaacatcagacaggtttacgttactatcaggcatatcacctcagaatcagatgaaaactataaagaaatatctattatggttttaatatttgttgataaggatagtaacatgaacatgacaaaaggtgcactcatcctcagccttagttttttgcttgccgcatgtagtagtattccgcaaaatatcaaaggcaataaccaacctgatattcaaaaaagttttgttgctgttcataaccagccggggttatatgttggtcaacaagcgcgctttggtgggaaggttatcaacgttatcaatggcaaaacggatacgttgttagaaatctctgtattaccgttggatagctatgcgaagcctgatattgaagccaactatcagggccgactgctcgccagacaaagcggcttccttgatccagtgaactatcgtaatcactttgttaccatcctcggcaccattcagggtgaacaacctggctttatcaataaagtcccgtataacttcctggaagtgaatatgcagggcatccaggtgtggcatttgagagaagtggttaataccacctataacctgtgggattacggctatggtgcattctggccggaaccgggctggggtgcgccttactacaccaatgcggtgagtcaggtaacacctgagctggtcaaataacaccaccgaaagatgcagatgctttctcagcatctgcatcatgcattacatcaaattaatacacagtaagctaactattattattataagccctgtcctgttaattacctttggcaaactgattataaagttaatgtccgcaccaggagtcggttatgtttcttataattaccagggatacgatgttcttcaccgcgatgaaaaacattctgagtaaaggtaatgtcgttcatatacagaacgaagaagagatcgacgtaatgttgcatcagaatgccttcgtcattattgatacattaatgaataatgtatttcattctaattttctcactcaaattgaacgattaaaacctgtccatgtcattattttctccccctttaatattaaacgctgcctggggaaagtgccggtgacctttgttccgcggactatcactatcattgattttgtcgcactcatcaatggcagttactgctctgtgcctgaagcggctgtgagtcttagccgcaagcaacatcaggttctgagctgcattgcgaatcaaatgacaacggaagatattctggagaaactgaaaataagcctaaaaacgttctactgccataaacacaatatcatgatgatcctcaatcttaagcggatcaatgagctggtacgccatcagcatattgattatctggtgtgaatttcaggcttacggtgagtctggctacgctgccacacagattagctaatactaacgcctttcacccctgccataccttttaataatcgcaacaggtcttctatgctcgttgtggcatgaagctggatatcaatggcgaccacttcatgatcttcattttcctgcaagctaactaaatcagtttttattttttgctgcttaaaccagtcgagcatacttaccgtattaccgttcactaatgtcagctgtaaatggtaatttttgttcatcaggcggaaggttaattgatggaagacttccagcaccaacaaggtcatcacactaccataaatacccagttcgtacataccgctgccaataaccatacctatggcggcggtcacccagatatccgctgccgtcgtcagacctacaatattttggttacgaacgagaatgttacctgcaccgataaacccgacgcccgtcaccacctgagcagcaatacggctggggtcgagtccgacgtgatctaaagacagcacgtcagcaaaaccatatttgctaacaatcataaacagggcgcttcccatgccaattaatacatgtgtgcgtaaccctgctcctttgccgcgcatttgcctttccatgccaatagcgccacaggcaattgccgcgagtataagacgtataataaattctgctgtcatataaaaatgcaaaaaggagcagcaagatggctcaacttgctactcctttttacttgcacctcattaattcggcaagtcattagatgcttgatttttgaaggtatacaaatttttctgcgggtttttcttacagtattcgatcactttaggaatttgagtgagatcggtttcatttaaagtaacggtatcgccacctttatatactgtttcttcatgcagcatccaccatgcaaccggggtcattgcttttggattcagatcaataaattcctggcaggtcatatctttagcggattcattggctgccaacgcagattgtgcgttcaccagactcaaagccgctacagcgcccataaaaataaacgctttacggagagaactaatattcattttgtaacccattcaatatagagattatatatgaacaggaggaatagctgcttttaaagaagatattccggcctgttcaatatgcaaggaagtacgatgtaacgcattcccggaattacatatctttcttaattttgtcccattcgcctttaactttatctttaaagttggcttgtttatcctgagtacaagcctgaacgatagctggggttacggttgcaataccctgaacatctaaaaccgcatcttctggtttatctttgttgttcagcgcttcagcaaaaccaactgcagttggctggaaggattcgtccacagccaggaaatcttcacaggtccaggagttgaccggttttttgttatcagctgctttttgcgcatccgctgcattgctcacaactggcagaagaagcagaccaccaagaataacgcctaatacttttttcatcgtaatatcctcaactataaagtgaaagagccgtcacgaatcaatttcgacactgaggttataacctggttttctgtatatgtcatgttgatggaaaatatcaaaatcagatatttttatttcaatacaatgagttacagatgcatcagatactgcaattaggaaatttttattaaatcgactgcattcttagacgcgtttttggcatagattgatagcaggggattttcttcttaattttatagggtggttctatgttatatatagataaggcaacaattttgaagtttgatctggagatgcttaaaaaacatcgcagagcaatccagtttattgccgtgctgctgtttatcgtcgggttgctgtgtatcagtttcccgttcgtctctggcgatattttaagcacagtagtgggtgcattattaatctgcagcggtattgcgcttattgtcgggttattcagcaaccgcagtcataatttctggccggtattatccggtttcctcgtcgcagtcgcctatttattgatcggctatttcttcatccgcgcaccggagctgggcatttttgccattgcggcatttattgccggtttgttctgtgttgcaggggttattcgcctgatgagttggtatcgtcagcgtagtatgaaaggcagctggctacagctcgttattggtgtgctggatatcgtcattgcctggatattccttggtgcaacgccgatggtgtctgtaacgctggtttccacactggtgggaattgaactgatatttagcgccgccagcctgttcagcttcgccagtttgttcgttaagcagcaataattaccccggttgtcacccggatcatagtcacttgatgtgactatgatccgattaatactctctccgctacgcagtgttgtagatcaattgcgcactatcattgaaataattacctgctagtgattatttcaacctactgaatttcatctaatttttttcactctatggcaaattagccatttcaaacattatcatggctgatattttccgtagtcaggtttaatgttttaaaagtgctgtgggaaagtgaacaaagagttccgtaagcgttgatgctatgggcggttaaataagtaatccgggttcatttttttgcaactggcgttgattacattgcataaatatccgtgtctccagacgctatataaaaacctgaagacatgaatgcgttatttactcaggtaatttcaatgcgttaaaagaaagctggcaatccaattgccagcttaagtcgaaacaaggagactcgatatttaaatcggattacattttaactttagtaatattcttcagagatcacaaactggttattgataacttattcttgggcagtaatccgcaaacgttaactttttgtttgctatttacaagctgataacaaccaggaatcttacttaggatcaatatatggagtgcgtgatggataaatctgaagtattgattagtgttaatagacgtattagttcacgaagggtaaagttcttataggcgtttactatattgaacaacgattcggacaaggatgtaaataatgaaaaggatgacatattcgaaacgataacggctaaggagcaagttatgatttttctcatgacgaaagattcttttcttttacagggcttttggcagttgaaagataatcacgaaatgataaaaatcaattccctgagtgagatcaaaaaagtaggcaataaacccttcaaggttatcattgatacctatcacaatcatatccttgatgaagaagcgattaaatttctggagaaattagatgccgagagaattattgttttggcaccttatcacatcagtaaactaaaagctaaagcgcctatttattttgttagccgcaaagaaagtatcaaaaatcttcttgagattacttatggtaaacacttgccccataagaatagtcaattatgttttagtcataatcagttcaaaattatgcaactgattctgaaaaataaaaatgaaagcaatatcacgagcacgctcaatattagccaacaaacattaaagattcagaaattcaacattatgtacaagctgaaactaagacgtatgagcgacatcgtcaccctgggtatcacatcttatttttaatcaggacataagcaactgaaattgatggctggcatgacgagggatgcagatgctgatttcattacccccggtgattactaaaggagaggctaaaacgactttattcccctggtatgtgtatccaccagtagaacccttcgttgcccgaatgctggcaggaactgttggcagaacggcaacattttttttgtcgttgacctcaccatgtcgatcactgtgcctgtatcccaccttactggctgacaaccccactatgccgctggtctgtaaatccctcatatctctcctcgcgcgcaatttaaagaaccgttatttctcaagaattttcagggactaaaatgaacagaagaagaaagctgttaataccgttgttattctgcggcgcgatgctcaccgcctgcgatgacaaaagcgcggaaaacgccgccgccatgacgcctgaggtcggtgtcgtcacactctcccccggtagcgtcaatgtgttgagcgaattgcccggtagaaccgttccttatgaagttgccgagatacgtccccaggtgggcggtattatcattaaacgcaactttatcgaaggcgataaagtgaaccagggcgatagcctgtatcagattgatcctgcacctttacaggccgagctaaactccgccaaaggcagcctggcgaaagcgctctctaccgccagcaatgcccgcatcacctttaaccgccaggcaagcttgctgaagaccaactacgttagccgtcaggattacgacaccgcgcgcacccagttgaatgaagcagaagccaatgtcaccgtcgccaaagcggctgttgaacaggcgacgatcaatctgcaatacgcgaatgtcaccagcccgattacgggcgtcagcgggaaaagcagcgtgaccgtcggcgcactcgttaccgctaatcaggcagatagcctggttaccgtacaacgtctggacccgatttatgtcgatctcacgcagagcgtgcaagatttcttacgcatgaaagaagaggtcgccagtgggcaaatcaaacaggttcagggcagtacgccagtacagctcaatctggaaaatggtaaacgctacagccagaccggcacgctgaaattctccgacccgacagtggatgaaaccacgggctccgtgacgttacgggcgattttccccaacccaaatggtgacttgctgcctggcatgtacgtcacggcattagtggatgaaggtagccgccagaatgtattactggtgccgcaggaaggcgtcacccacaacgcccagggtaaagcaacggcgctcattctggataaagacgatgtcgtgcagctacgcgaaattgaagccagcaaagccatcggcgaccagtgggtcgtcacctctggcttgcaggctggcgatcgggtgatcgtttccggtttgcaacgcattcgtccgggtatcaaagcacgagcaatttcctccagccaggaaaacgccagcaccgaaagcaaacaataacgttgcaggcttaaggggactttcatggctaactattttattgatcgcccggtttttgcctgggtacttgccattattatgatgcttgcaggtggtctggcgatcatgaacttaccggttgcgcagtatccgcagattgcgccaccgaccattaccgtcagcgctacctatccaggtgccgatgcgcaaacggtagaagacagcgtcactcaggtgattgagcaaaatatgaatgggcttgatggcctgatgtacatgtctagtaccagtgatgcggcgggcaatgcctctatcactctgaccttcgagactgggacatctcctgatatcgcacaggttcaagtgcaaaataaactgcaactcgctatgcctagtttacctgaagcagtgcagcagcaggggattagcgtcgataagagcagcagtaatatcctgatggtagcggcgtttatttctgataacggcagcctcaaccagtacgatatcgcggactatgtagcgtctaatatcaaagacccgctaagccgtaccgcgggcgttggtagcgtacaactctttggttccgagtatgccatgcgtatctggctggacccgcaaaaactcaataaatataacctggtaccttccgatgttatttcccagattaaggtgcaaaacaaccagatttccggtggtcaactgggtggcatgccacaggcggcagaccagcagctaaacgccagcatcattgtgcagacgcgtctgcaaacgccggaagaatttggcaaaatcctgttgaaagttcagcaagatggtagccaagtgctgctgcgtgatgtcgctcgcgtcgaacttggggcggaagattattccaccgtggcacgctataacggcaaacctgctgccgggatcgccatcaaactggctgccggagcaaacgccctggataccagccgggcagtcaaagaggaactgaaccgcttaagtgcctatttcccggcaagtctgaagacggtttatccttacgacaccacgccgtttatcgaaatttctattcaggaagttttcaaaacactggttgaggctatcatcctagtcttcctggtcatgtatctgtttttgcagaatttccgtgccacaatcatcccgacgattgccgtaccggtggttattctcgggacgtttgcgatcttgagcgcggtcggtttcaccatcaacacgttgactatgttcgggatggtgctggcgatagggttactggtggatgacgccatcgtggtggtggagaacgtcgagcgtgtcattgcggaagataagctaccgccgaaggaagcgacgcataaaagcatggggcagatccaacgtgcgctggtcggtattgccgttgttctttccgcagtgtttatgccgatggcctttatgagcggtgcaaccggggagatctaccgccagttctccatcacgctgatctcctccatgctgcttagtgtatttgtggcaatgagcctgacccctgccctgtgcgccaccattctgaaagccgcgccggaaggcggtcacaaacctaacgccctgttcgcacgcttcaacacgctgtttgaaaaaagtactcaacactataccgatagcacccgcagcctgttgcgttgtaccggtcgctacatggtggtctacctgctgatttgcgccgggatggcggtgctgttcctgcgcacgccgacctctttcttaccagaagaggatcagggggtatttatgaccaccgcgcagttaccttccggtgccaccatggttaacaccacgaaagtgctgcaacaggtgacggattattatctgactaaagagaaagataatgtccagagcgtgtttaccgttggcggctttggcttcagcggtcaggggcaaaacaacggcctggcgtttatcagtctcaagccgtggtctgaacgtgtcggtgaggaaaacagcgttaccgcgatcattcagcgggcaatgattgcgttaagcagtatcaataaagccgtcgtcttcccgttcaacttacccgcggtggctgaactgggtaccgcgagtggttttgatatggaactgctggacaacggtaacctggggcacgaaaaactaacccaggcgcgaaacgagctgttaagtctggcagcgcaaagtccgaatcaggtcaccggggtacgcccgaacggcctggaagatacgccgatgttcaaagtgaacgtcaacgctgcgaaagctgaagcgatgggcgtggcgctgtctgatatcaaccagacaatttccaccgccttcggcagcagctacgtgaacgacttcctcaaccaggggcgggtgaaaaaagtgtatgtccaggcaggcacgccgttccgtatgttgccggataacatcaaccaatggtatgtacgcaacgcctctggcacgatggcaccgctttctgcctacagctctaccgaatggacctatggtagtccgcgactggaacgctacaacggcatcccgagtatggagattttaggtgaagcggcggccgggaaaagtaccggtgacgccatgaaatttatggcagacctggtcgctaaacttccggcaggcgtcggctacagttggaccggactaagctatcaggaagcgttatccagtaatcaggctcctgcgctgtatgcgattagtctggtcgtggtgttcctcgccctcgccgcactctatgagagctggagtattccgttcagcgtgatgttggttgttccgttaggcgtcgttggcgcattactggccaccgatctgcgcggcttaagtaatgacgtctacttccaggttggtttgctgaccaccatcgggctttccgccaaaaacgccatcctgattgtcgaatttgccgttgagatgatgcagaaagaagggaaaacgccgatagaggcaatcatcgaagcggcgcggatgcgtttacgcccaatcctgatgacctctctggcctttattctcggcgtgctgccgctggttatcagtcatggtgccggttctggcgcgcaaaacgcggtaggtaccggcgtgatgggcgggatgtttgccgcaacagtgctggcaatttacttcgttccggtctttttcgttgtagtggaacatctctttgcccgctttaaaaaagcgtaacgtgtaaatgagagtaaggttgaacatgaaggttcagccttactctttcctgctaaccattcaccactcaacaaccagctaaccgtcaggaataccaggcttagtacacagcactgaaagtagaaaccactccagccattcgtcatcaatttgaacaacacaatactgacccacattcccgtaatcgtatgaattgtcagcttaataatcccaaacatgccgagtcttttcctcctgaaaataccgataccgcctggcaaactgcgaaagagaactagccggtagcccggcagaaatcatcagggaagagtttcacatgaagcaggtgtgagatcctgaccaatattcaaatgcgaaatatgtcaggaaaaggtacctgggctatgttgcgcaaactgatgtggcgttacaccataatattgtcgaaatgtgtttataaagtagcttgtactgctatagccacatttttccgcaatagtatgcagaggaatttgacgtaactcgagtaatcgtctggccatgctcatcctggaggcgagtaatattttactgaaacaggtattttcatcctgcaacttttttttgattagactctcgctggtatacattctttccgcgatatcgcgcagataccaacgtttggcgatatcaaagctaataaggcgttcaacttttccactaacagtgctgatgctattgaaaagtaaggggatcagttctttcttatgagaaaacatgcttaaacaggaaaggtagagcatattgctcagtatcggactatttaccccggattcattgaagctatcaaaaatcgccgtcaccagcggcatggggggactctggttaattaacaaacggtctttgctgtgtaaccctaaattgcgtggtagctgacgaatattttgtaagtaatggcaaactgtcagctcatcgatatccagtcgtcgcgtatccggactacaaaacgcaaaatcgtctgccaaatttttctccagcagcagaatactctcgttatgcaggcttattttttgctgttcatgataaatatcgaaactacgacgaatgaggatcacgctgcagacatgagtcatgattatcccttatatttcatactgcgattatttcaatttcagtatactaatgaaatgatgccagactgtttcttagcgcaaaaactgccagatttggtaggaccaaaatttatccacaaagtagttttgcataacagttaattgataataagtaaatgcagcacgaatatattttcgcacagcgtatagcttatgtttataaaaaaatggctgatcttatttccagtaaaagttatatttaacttactgagagcacaaagtttcccgtgccaacagggagtgttataacggtttattagtctggagacggcagactatcctcttcccggtcccctatgccgggttttttttatgtctgagtaaaactttataatcttattccttccgcagaacggtcagtgccgtaaaaattcccttgcgcaacaatacttgccgcgctgtcacggttgctcaatctctgcgcgcttcgctcctgatactctgtgggcgtcatcccataataatttcgaaagacgtaaatgaaatagctcacgctgtgatatccacaggatactgcaactcgcttaatactaaaaccatgtataacaataagttgcaaagcacgttgcattctacactcagtaagcaactgactataacttgtctcttcttcgcgcaattttttctttaacagacttggactcatcaacagctcgctggcgattcgggctagtgtccactcatgggcgatattattattgataaccgtacaaactcgtgttcgcatgttcggttgtaaaacgttcagaagcagcggtataaagtgctcatcctcaagaaaaacagataacaacgcaaagattaatgctcttttacgtagcatttctgcatagcgaagattcttattctggcttagttgcgcaacttcctgaaaaacaggaatatctctactacagtgatgaacgagtaaactagaaacttttttatgtgcatgaagatttaatgcctcctccttgagcatcgggagaaataaactaagcgtgtccctactcacgaatacaaaattttcaacacacttatctactcgaatttggcttgcatccgcaaaaaccaggtcaccgccattaaaatagcgatattcaccattaaccatggtgagaatatatttatgtcttgcatacgcaattagacaattcccatgtagactttgcatagttgacttaatattacataaacatattactgtttattaatgtagcacgccgccctcttaagtcaaattgattgataaataaatttaaacgaagcgggagaacaggatgataatgtgtgatgttctacgggcaggatgactggatttataatacaaaaacgtgtttaagaacacagggaaattaatagtaagcaaataatcccttttcgtgacattaaaggtaatcgctacatttaataaacattcatataacatatatcttatcaacacgatgaatagacagccaatatattattgcgattaataagcaaccgaatgcccagctgtttttttaaaggctgggcattcggtttttacaacgttatgttatcaggtgtgtttaaagctgttctgctgggcaataccctgcagtttcgggtgatcgctgagatatttcagggaggctttgtagtcttccagcaacagttcagcaaagtccatttcgaagccgcgacgacacataatgcgcatcaccacgatgtcggtggcttcaccgccgagagtgaaggccggaacctgccagccgcgcagacgcagacgttcagagaggtcgtacagggtgtatcccggatcttcaccatctttcagtttgaagcaaaccgccgggatgccttcgtccgggcgacccgtacagatgaactcatacggccccagtttggcgatttcatccgccagataagcggcaacctggtaagaggcgttctgtactttggtatagccttcacgaccgaggcgcaggaattcatagtactgtgcaattacctgacccgccgggcgggagaagttgatggcaaaagtaccaatttgaccacccaggtagtcaacgttgaacaccagttcctgcggcagcgcttcttcgtcacgccagataacccagccgcagcccagcggagccagaccgaatttatggccactagcactgatgcttttcacacgcggcaggcggaagtcccagacgatatccggggcgacgaacggtgccaggaagccaccgctggcagcgtcgatgtgcatgtcgatgtcgataccggtgtcggcctggaatttatccagcgcatcgtgcagcggttgtgggaactcatagttaccggtgtaggtcacgccgaaagtcggcaccacgccgatggtgttttcgtcacaggcttcaatcatgcgtttcgggtccataaacaactgaccggggcgcatagggatctcacgcagctccacatcccagtagcgggcgaatttatgccagcagatttgtaccggaccgcacaccaggtttggtttatccgttggtttgcctgcagcttccatacgcttgcgccaacgccatttcatcgccatcccgccgagcatacaggcctcggaagaaccaatggtgttggtgccaacggcctgaccatttttcggcgcaggcgcatgccacagatcggcaaccatatttacgcaacgcaggtcgatggctgcggattgcggatattcttctttgtcgatccagtttttattgatgctcaaatccatcaatttatggacgttttcgtcgtcccaggtctggcagaaagtggccaggttctgacgagcgttgccatcaagatataattcatcattgataatctgaaatgcgacatcatcgcgcatttcgtgcagcggaaatcgtttactctccgcgatagtagaaatggcctttgcgccaaaacgactatcgagtagttcactgcggaaatccgttaacagcttctggtccatttcgaactccttaaatttatttgaaggcaataaaaaagtaggatttatccgcaatggaagcaaggcattacaggcttaatttaaataacaaaatcctaagcagaaaaacgactttttataatataaacatttaacatgataatattaaaaacagactttattatcgtaataaaaatcgcccaaacattgctgttcgggcgatcaaattaattattgtttatcctgcatatacggcgtgtacaccccgttcagactgtgcaggaaagctacgatatcatccacatcctcctgcggcagctctttgcctacctgatagcgcagcatcagtttcaccgccccgtccagcgtcggcacgtcaccgcgatggaagtacggtgccgttaaagcaacgttacgtaaaccgggtactttctgacgcaatttatcacgctcttctttagtcacattcatacgaccaatatccgccgccgtaatttccccaaagttaaagtcttttttcagccccaacggttcaaaggaacgtccgccgagaataataccaccatgacaagttgcacatttattatctttaaataattgatagccttttttctgttgcgccgtcagcgcattttcatctccgcgcaaccatttatcaaatggggaatccggcgtaattaatgttttctcaaattcagcaatggcatcagtaatattttcgccactgaaaccttgcggatagacttcgaggaactgcgttttaagctgcggatctttttccagcttagcaataatttcgtcccaggatttgctcgccatttcaatcgggttcaacggcggtccaccagcctgatcctgcaatgttgccgcacgaccatcccagaactgctcaacgttaaatacactgttaaataccgtcggcgcgttaatcggcccaactgcgccaccaacaccaatgcttgtttttctgccatcgacgccccccgcattcaacgcatggcaatgagcgcaactaatggtgctatcagcgcttaaacggggatcgtgatacagcgcaaaacccaacgccactttttgcgcatcggtaggcagtttttgcgggatgggctgcaccggttcattgcgatgttccggagcagtatcattgctggcgtaatattccgcgcgctgttttgcaatccaggccagtatttccgcccgctcttcatcactcaccttacccgcccagtgtagcgcggtataacgcgttggtggcatagtttcatactgcatcacccattcaatcttattcaaatcgctttggctaacgggtttatcagccagcagtgccgcacgcacggcctcaaggttaaaagatttatatccaagcttaatgtcgtaatccatcaactgtttcgcgccaggaatataataataggcgggtaattctgcgctaggcgtgtggcaatagtcgcatcctttttcgcggagaaagcctaaaaccttattattttcactgacagcagatgcctgaacatcggcctgtttactgcgtttattatcgtggtaccacacataaccagataaccctaaatagcaaatcgcgacgccagccaggccgatcgcggtaatacgactgaccattttcattattcttccctcacggtggtgagttattgtgacccagaaaattttccagaatgctgcaaacgtctctgcgagacaaagccatcataaaaaacagggagatacgctttttgataggaatcaatcaattacatgaatataaactatcaataagatagcctgtgcctattacccagatcaggaatggcatatcatgattgcggcgagagcaggattgaatgttctgaaaatgaaaaacaacaccaaatcggtatttttataaattccattgatattagtgcgttatattttttgacaggttaataaacgtgatccaccgcacgctttgtcgcccaccaggcggagcgaatgactacccttaaagaaaagccgataattagcgacgaatttcggaggttggatccttatgctcaatcagaaaattcaaaaccctaatccagacgaactgatgatcgaagtcgatctctgctatgagctggacccgtatgaattaaaactggatgagatgatcgaggcagaaccggaacccgagatgattgaagggctgcctgcctctgatgcgctgacgcctgccgatcgctatctcgaactgttcgagcatgttcagagcgcgaaaattttccccgacagtaaaacctttcccgactgcgcacctaaaatggacccgctggatatcttaatccgctaccgtaaagtgcgccgtcatcgtgattttgacttgcgcaagtttgttgaaaaccacttctggctgccggaggtctactccagcgagtatgtaagcgacccgcaaaattccctgaaagagcatatcgaccagctgtggccggtgctaacccgcgaaccacaggatcacattccgtggtcttctctgctggcgctgccgcagagttatattgtcccgggcggccgttttagcgaaacctactattgggattcctatttcaccatgctggggctggcggaaagtggtcgggaagatttgctgaaatgcatggccgataacttcgcctggatgatcgaaaactacggtcacatccccaacggcaaccgcacctattatttgagccgcagccaaccaccggtttttgcgctgatggtggagttgtttgaagaagatggtgtacgcggtgcgcgccgctatctcgaccaccttaaaatggaatatgccttctggatggacggtgcagaaagcttaatccctaatcaggcctatcgccatgttgtgcggatgccggacggaagcctgctcaaccgttactgggacgatcgcgacacgccgcgtgacgaatcctggcttgaggacgttgaaaccgcgaaacattctggtcgcccgcccaacgaggtgtaccgcgatttacgcgcgggggcggcctccggttgggattactcttcccgttggctgcgtgatactggtcgtctggcgagcattcgtaccacccagttcatccccatcgatctgaatgccttcctgtttaaactggagagcgccatcgccaacatcagcgcgctgaaaggcgagaaagagacagaagcactgttccgccagaaagccagtgcccgtcgcgatgcggtaaaccgttacctctgggatgatgaaaacggcatctaccgcgattacgactggcgacgcgaacaactggcgctgttttccgctgccgccattgtgccactctatgtcggtatggcgaaccatgaacaggccgatcgtctggcaaacgccgtgcgcagtcggttactgacacctggcgggattctggcaagcgagtacgaaaccggtgaacagtgggataaacccaacggctgggcaccgttacaatggatggcgattcagggatttaaaatgtacggcgatgaccttctgggtgatgaaatcgcgcgaagctggctgaagacggtgaatcagttctatctggaacagcacaaactgatcgaaaaataccatattgccgatggtgttccccgcgaaggcggcggtggcgagtatccgttgcaggatgggtttggctggactaacggtgtggtacgccgtttaattggtttgtacggcgaaccataatatttttacagccagccgctaacttcctgctggctgtaaaattatcctcttcaggaggagatatttaacatcattgccgcctgggtgcgatttttcacttccagacggcgatacagggattccagatgcgcttttaccgttccggtactgatattcagcgctctgccgatctccttattactttcgcccgccgctaacatggttaaaatctcccgctggcgggcgcttaagcttttgagatctttaatgtccttttccggcgtcgtccgccagtctccaggcagaaacatcatccccatcgccgcactatttaccgccaacgcaaatgtctcgacggtactatcacgaggcacaatggccagcacattaaaatggataacttcctgtaaccaccgtttattgcaatccgtcgccgtaattaacaccttaacctcaggaaattgcaccacggttttttgcagcaaccagtagcaaaactcaccatcctgatcgccatcgagcataactaaggcttcagggtaactttccagcttttgccataactcgtctgcctgactggccccctgaatactcactcctggaatacgctgctgtaaactgattttcattccatgaataaatatactctgcctgtcaaacatgactatttgcataactgaatctccacctgaatacgttaaaaagacttaagtagtggaagggtattacccgcgagaaaaaataagaattcgccatttggcggtggccattctacagagatgacgtgtagaaaatagttaccgatataaatagttacagctaaacgcctgaaattacatgtcgagggcactatttaaaacaattttgaggatttccttatattggtggttagtacgcatgcaattaaaaatgaaattccgcgaccacaagccaaaataacaaacggcaaggagacaaaaataagcacaaatagccaacacgtcctctgttcactttaaagggaatcgctgaaaaatacgctctgtttaaggggattcacctttctcagaaagctattccgcccttttcctgctgagaaatcgccacattcggcatgacaacattgtgaaacccggcattagatgttagaaaaaacaataaacaatgcgatatgcgcgttactgtttcgctgtgaacaacaaagcgtcaaagaaatggataaaattcacgcaatgcagttgttcatcaaagtcgcggagctggaaagtttttcccgcgcagcggatttctttgctttgccaaagggaagtgttagccgccagatacaggcactggaacatcaacttggcacccagcttctccagcgcaccacgcgacgggtcaaactcacgccagaaggcatgacctattatcaacgagcaaaagatgtgttgagtaatctcagcgaactggacggtctgtttcaacaggatgccaccagtatcagcggtaaattacgcatcgacatcccgccaggaatcgcgaaaagcctgttactgccgcgcctgagcgaatttctctatctgcatccgggaattgagctggaactgagtagccatgaccgtccggtagatattcttcatgatggttttgattgcgtgatacgcactggcgcgttaccggaagatggcgttatcgcccgtcccctcggcaaactgaccatggtcaactgtgccagtccgcactatctgacgcgctttggttatccgcaaagccccgatgatctgactagtcacgcaatagtgcgttatacaccgcacctgggtgtacatccgttaggttttgaggttgccagcgttaatggcgtccagtggtttaagtctggcggcatgttgacggtaaacagtagcgaaaactatctcaccgccggtcttgccggtctggggattattcagatcccgcgcattgccgtgcgcgaagccctgcgtgccgggcggcttattgaagtattacctggctaccgtgccgagccgctctcccttagcctggtttatccgcagcgtcgggagctttcccggcgtgtaaacctgtttatgcagtggctggctggcgtaatgaaagagtacctggactgaccgactatactttttaagaatgaccacgacagaaggacaaaagagcggatgacgcaggaaaacgagatcaaacgtcccatccaggatctggagcacgagccgattaagccgttggataatagcgagaaaggcagcaaagttagccaggcgctggaaaccgtcaccaccactgccgaaaaagtccaacgccaaccggttattgcgcacctgattcgcgcgacagaacgctttaacgatcggctgggtaaccagtttggtgcggctatcacctatttcagttttttgagcatgataccaattttgatggtgagctttgccgcagggggctttgtgctggcctcccatccgatgttgctacaggatatcttcgacaaaattctgcaaaacatcagcgatccgacgctagccgccacgttgaaaaacaccatcaacaccgccgttcagcagcgtacgactgtagggcttgtcggcctggcggtggcactttattccggcatcaactggatgggtaacctgcgtgaagcgattcgtgcccagagccgcgatgtctgggaacgcagcccgcaagatcaggagaagttctgggtaaaatatctgcgagattttattagcctgattggtttgttgattgcgctgattgtgacgcttagcatcaccagcgttgccggtagcgcgcagcaaatgattattagcgccctgcacctgaacagcattgagtggctgaaaccgacgtggcgattgattggcctggcgatttccatcttcgccaactatctgcttttcttctggatcttctggcggttgccgcgccaccgtccgcgcaaaaaagccctgattcgcggaacatttctggctgctattggttttgaagtgattaaaatcgtgatgacctacaccctgccaagcttgatgaaatccccctctggcgcagcatttggttccgtgctggggctgatggcatttttctacttcttcgcccgtttgacgctgttttgcgcggcgtggattgccaccgccgaatataaagacgacccgcgaatgccggggaaaacgcagccttaaaataggccggatgcggcgtaaacgccttatccggcatacgattttattcggcctggctccccgtaggccggataagatgcgccagcatcgcatccggctataatgcgcacataacctcttgaaactcgtccccagagcctcttcagccatctatttgggagcaaacaatttcattccaactcataaccccagcatataaatccagttggtaacttttatttaacctgaaaccagttttatccactatttataaaattatgtgaagcatttcatagaagaaaaatcactggcctaaacattatcccctttttgcctgatttttgaccatttccgcgatttgttacacattgaaatatcacttttgctgtgcgtaatatggctattcgttagccaaaaaataagaaaagattatgcaagcaacagccacaacactcgaccacgagcaagaatacacgccgatcaacagccgtaataaagtccttgtcgcctctctcattggcacagccattgagttcttcgacttttacatttacgccactgcggccgttattgtgtttccgcatatcttcttcccgcagggcgatcctacggcagcaacgctacagagcctcgccaccttcgccatcgccttcgtcgcgcgccccattggctctgccgtttttggtcattttggcgatcgcgttgggcgtaaagcgacgctggtcgccagcttgctaacgatggggattagcaccgtggtgattggtctgctgccgggctatgccacgattggtattttcgccccgctgctgctggcgctggctcgatttggtcagggtctgggcttaggcggtgaatggggcggcgcggcgctgctggcgactgaaaacgccccaccgcgcaaacgtgcactgtatggctcctttccgcagctgggcgcaccgattggcttcttctttgccaatggcactttcttgctgctttcctggctactgaccgacgagcagtttatgagctggggctggcgtgtgccatttatcttcagcgcggtgctggtcattatcggcctgtatgttcgcgtgagcctgcatgagagcccggtgtttgagaaagtcgctaaagcgaaaaaacaggtgaagatcccgctgggtacgctgctgaccaaacatgttcgcgtaaccgtactgggtacgttcattatgctggcaacctatacgctgttttacatcatgacggtctactctatgacctttagtaccgccgccgcgccagttgggcttggcctgccgcgtaacgaagtgttgtggatgttgatgatggcagttattggttttggcgtgatggtgccagtcgctggattactggctgatgcctttggtcgccgtaaaagcatggtaatcatcaccacgctgatcatcctgttcgcgctgttcgcctttaacccactgctcggttctggcaacccgattctggtttttgccttcctgctgctggggttaagtctgatgggtctgaccttcgggccaatgggtgcgctgttaccagagctgtttccgacagaagtgcgttacaccggagcaagcttctcttacaacgtagcgagcattctcggggcttccgttgcgccatatatcgcagcctggttgcagactaactacgggctaggtgcggtggggttatatctggcggcgatggctggcttgacgttaatcgccctgctgctgacccatgagacgcgacatcagagcttgtaataagagtgaaaagcctgatgcgctacgcttatcaggcctgaatttccatacaatatattgaattcgcaaggatttgtaggccggataaggcgttcacgccgcatccggcatgaacaaagcacactttgccaacaatctaaatctgtttaattgccggatgtcagacatccggcaattatcatcacttcttcatctggctcaaaatcgtccgacactgattagcctccccttcggaaggactgatcagtgccagtaacgccgccgccggtgttaccagcgttgccagtgccgcagcaacagcaccacgggcaatcagcggtccggctttcaccccagcctgcggatttttaaacgtcccccgcacatacagcgggctacgcagtgtgataatccgaattcctttactctccggatcaatagtcaaatccagctgttcgctagcaaaacttgccgtgccggtaacattaatcaacgcgttctcagtatcgaaagcaaaaatctgcgggcgcgccacgccgttggcaatattcagattcgccgccgcgcagttcacccgcacctcatcatcaccaaatatcgcaccgacaatgtagttgccgacattcagcccaacaatctccatcaggttgcggctcaccagcccgtcattcatcaacagtttcaggttgccgttactgttgcctaaaagtgccgccacgctgttaccgctaccgcgtagttccgcgtcaccgttcatttcccccagcgtcttctgcatcagttccacatcgggcatcagttctttcagtttcagtcgacgagcctgaatatctgcccgcccctgcatcggctttttatcgccttccagatgaatattcgccgcaatgctgccgcccgccatgccaaatttcagcggttgcaggcgcaggtcagcatttttgaggatgatatgagtagaaagatcgctaatcggcaggctactgccatgctcaatgcgccgccctttgaagcgaacatcggcatccataacgtcccatttatcggtttcgaagcggtcataaggcagcactttgcccgcaggctgaacgcttttttcgcccttcttctgttcagaccgtttgctcttttctgcccctttcccggaatcaacgccaatcaacggtcccaggtccgccagccgcaattgccggctctcgacatcaccttccagttttggtcgtggctttccggtggtgtagaccagagaaccgtggatatcgctatcaccaattcgcccattaaaaccgcgataatcaaagacgctgcttttttcagtgtcgattttcgctaccagccgaccatccgtttcaaacggcggggtatcgggcagcagaacgcccgtcagttcatagagatcacccagactatcgccagaaaatttaagccgtaaatcgacaccgcccatcttcattgggtcattcacgacgccatcaaaagcaacacgggtgttaccagagcggaaatcagcctgtaccggaaacggcgtcccttcgccacgcagcgccagcataccgcctatttttcccgtacccgtgagcggttcaccgttatatcgtccctgcgccttcaggccaaaaacgtaatcgcccaccttttctttatccgctttacctttgcttccagtaacttcgctgaacggcagcggcttgcctaagggatcaacaaaaatctccagatccgctttgcttactttgtcatcaatggcgatccgcccttgatcgaaaagaatattatccagccgaaagctccatgcgctcggctttgcattcgcgtctttgttatcatcgttggcaagattaaacgtccagttattgttcttttcagagaggcgaatcaggcgcgcgtcgggcttttcgagcttgatccacggcagccagaccgttttggtcagcagcgccagcggggccagcgttgcctctacgcgtggcaaatgcaccatcgtgacttcgggaatatccggtggattgccaagaatgatgtcttccgcgtgtacatggggccacggcacccagctgcgccagccagtttcttgtttttgccgctcccacaccacgcccagatcgccacggatagcgaacggacgattcaactccgcagagactttctggttgatagtcggtttgagtcgattccagtcaaaagttgcaatcaaaatgatcgccacgacaatcaacaacaagaaagccccactaatcgcagcggttattttgcctgccttgctcatcgttcgcttcctcatattcttcctgtgccagtcctaaagatagtccagccaggcggaaaatgaggcagcttatagcgccagaaccgccgtattcagcgtttctatcggtgccgggcgactaagaaaccagccttgtgcggcgaatgcggggctgttctgaacatcacgccactcttccggcgtttctacgccctcgacaatcaccccgcgacaatagcgattcattagatgtaaaagctgagaaaagagtgtgcgtccttccgggctctgacgcagcatcacaaacagttctcgcgcgattttgatgtagtcataacgcacttcacttagcgcagagaaatttgccatcccggtaccaaaatcatccagccacagcgggccaaattcacacatgctggcaaaggtactatctttcggcagacggatatgctccaccagttcgaaacgcagccagggaagacgctcaatctggcgcaggatttttggttgctgacgcagggcgatgagcgtagggccatcaatattgacgcttgccagcaggccgtgctctataaagaagtcggctttttgcgccagcaaatcaatctgctctttcacaacctccatccgatggctgacggtgatttcagtaaaatagcgatccggcggcaggcgttggctagggttcaagggatgcgtgaccaccgttaatagctccacggccattaaccgcccgcatgtttgatagatcggctgccaggtgtaagcacgctcacactgcaaccaaaaacgccgttcctgcaagctctcgatgcttgcttcagggttgcttattcgctggataacctgccttatcatcaaagatgtcctgtgtttaaaagtgatgctgcccggactcgacaaagattatcggcgcgtaagggcagaactttaccgcctggccggggtaaatttcctcactccacaacggaatctttcaggaatacgttctggctcaaaaaaataatggaacactgttttaatatggttgaccagcaaaccaccacagcgcaaactaacgctaattttttacagatcaggttcacgactatgtccaaaaagattgccgtgattggcgaatgcatgattgagctttccgagaaaggcgcggacgttaagcgcggtttcggcggcgataccctgaacacttccgtctatatcgcccgtcaggtcgatcctgcggcattaaccgttcattacgtaacggcgctgggaacggacagttttagccagcagatgctggacgcctggcacggcgagaacgttgatacttccctgacccaacggatggaaaaccgtctgccgggcctttactacattgaaaccgacagcaccggcgagcgtacgttctactactggcggaacgaagccgccgccaaattctggctggagagtgagcagtctgcggcgatttgcgaagagctggcgaatttcgattatctctacctgagcgggattagcctggcgatcttaagcccgaccagccgcgaaaagctgctttccctgctgcgcgaatgccgcgccaacggcggaaaagtgattttcgacaataactatcgtccgcgcctgtgggccagcaaagaagagacacagcaggtgtaccaacaaatgctggaatgcacggatatcgccttcctgacgctggacgacgaagacgcgctgtggggtcaacagccggtggaagacgtcattgcgcgcacccataacgcgggcgtgaaagaagtggtggtgaaacgcggggcggattcttgcctggtgtccattgctggcgaagggttagtggatgttccggcggtgaaactgccgaaagaaaaagtgatcgataccaccgcagctggcgactctttcagtgccggttatctggcggtacgtctgacaggcggcagcgcggaagccgcggcgaaacgtgggcacctgaccgcaagtaccgttattcagtatcgcggcgcgattatcccgcgtgaggcgatgccagcgtaaacgcagcatatgcaaaaggctggataaagtgttacccctctatccagctcatccataaatacctgatggttgtgctaactcatcaccatcaggcattactgtgcaggtggaatatccgtcacttcaggatgtacgtcatccgtggcgacagaggtggtcgcagcggcggtagatggggccatgatttgatcccagaccgcctgcaacgctttcatgttaaattccggctcgcctttcggctgcagcagtattaacgccatatcattgctcaactgttgacgcagatcctgatttaacatctctaccgtcaggctattaaggaaatcctgccgcagtttctgatattgctccggcgcgatatcgacaacctgattttgcaagctacgcatccgctgacccatcagaatatcggtatcagctcgtgcataggcggcaaacagtttctgcagctccagtttcttttgcgccactaacgcattgaactcttcttccggcagacctttatcgcgaaccttcgccagttcacgcgccaccagattaaggttgctgttcagcttgtcgtttggactttcgatgttgatggcacactgcgcacgcagatacagcacacggcagtcaaatccaagaccgatgtctttgctgttactggcacttaacgcttgctgaacatgccagaacagcgcctcgcgggccaggtccgcacgccagtagcgcagcagtgcggcactttcacgaatcggctgccacggcgtatcccacatgatagataaccggtcctgacgcaccgcgtcagtcataatactcaccgcttccgcacgcagcggagaaagcgtcggcaccggagctggcgtttcacgtttgcctttcagttcgccaaacgttttgtttatttggtcgacaacgctgcgcgcatccacgtttcccaccaccagtagcgtcattgcatccggggtgtaccatttctgatagaaatctttaattttttccgcttcaacgggttgtttcagcggatcggcaggatcgtgacctaacaaggtactccctttcagacgatagcgccaccagccctctttagtatcggcaggccaggttgccaccatgtcctgactttgcagcgcgtggttgatggtttctggtgtgatggtcaatttgccagtggcatttgccagataagagagcgcttctttcagcaaatcgttacggttattgggcaaactcagattaaacagcgtggtgtcataagagacaattaccggcggcatcgggcgtttagggtcgatcccctgctgccacaaactacgcgcctgtgctgcgtcaaggccaccgctttgcgttagcgcaatacgagggatggcgtgactgtaaccgctctgttgtgtactttcggcgaggctaccggtattaaccagcaggcgaatttcaacacgatcgctgggacgctggggggtggtcagcacttgccactgtaaaccgttggaaagcgtcccctgttgccatgctggatcaggctggagcgcatctgcctgcacatagccagcagtggccatcatcagcaaaccgcccgctaaaagtcgaatttttgtgccctgcatgtgaacccctgatcaactatcctggtaataaaaaaactgcccgttgtcggtcagtctaaatgacgttaaaaacacttcgtgttagaccgcaagaacatgaaaatgtcacggaagaagtgaaataaacctgaactcacccaggtggtaagttcaggcacaggggtcaattatgcgcaaacacccgcactcggggaagggagtgcgggcataagtgatgagattaagaggataattcgtgcgttttgccatccggcgcacgattattcagcacatcgtccagttttttgtggtccagttctttcacccacttagcaacgacaatggtcgctacgccgttaccgaccaggttagtcagcgcacgagcttcactcataaagcggtcgataccgaggatcagcgccagacccgctaccggcaaatggcccaccgcagagagcgtcgccgccagcacgataaagccactacccgttacccctgccgcccctttagaagaaagcagcaacacgattaacagcgtgatttggtggacgatatccatctgactgttagtggcctgggcgataaacaccgccgccattgtcaggtatatgcttgtgccatcaaggttaaagctgtagcctgtcgggatgaccagccccaccacgcttttacggcagccgagtttctccatcttgtcgagcatacgcggcagcgcgctctcggaagaactagtccccagtacaatcagcagttcttcacggatgtagcggataaatttgaagatactgaaaccagtcgctttagcgatactacccaataccagcaccacaaacaggatacaggtaatgtagaaacagataatcagctgccccagttgcaccagtgtgccgacgccgtatttaccgatggtaaacgccattgccccgaacgcaccaataggtgccagacgcatgatcatattgatgatgccgaagatgacctggctgaaactttcgatgacgttaaaaatcagttggcctttgctgcccagacggtggagcgcaaaaccaaacagtacggcaaacagcagcacctgcagaatgttaccgctggcaaatgcgccaatgacgctcgccgggatgacatccataatgaaggcgacaatgccctggtctttcgcctgatcggcgtaaaccgctaccgctttcgcatcaagcgttgccggatcgacgttcattccggcaccaggctgcacgacgttaacgatgataagaccaataatcagcgcgatggtactgacaatttcaaagtaaagcagtgcgactgcgccggtacgaccgaccgccttcatgctttccatgcccgcaatgcccgttacgacggtacaaaagatgacaggagcgatgatcatcttaatgagcttaacgaagccgtcgccaagcggtttcatttgctcgcctatttcaggatagaaatggccaaggagaataccaatggctatcgctgtcaggacctgaaagtaaaggcttttaaacagagaggttttcatagggtgtcctttagtaaaaccacaggtcttgtaaggttatggggtacctgcggccttaaaataacacccagacaacatcacagaaatgtacctggatcataattgaaacaaaaaggttaaaaagtttgagctggctcgcacaaaccagcactttttaaagttttgtaatcagtttggggtagttacttttcttccaggtaactctcttcgaagatttcaatagggagtgggcgagcaaaaaggaagccctgggcaataccaacgcccgcttttgccagccagtcgcgttgtgcttcagtctccacgccttcggcaatcatttgtaagttcaggctctgcgccagcatgataattgcagcaatcatgctgctatctcccggcaagccttcaacaaacattttgtcgattttcagtacgtcgattggcaagcttttcatatgctgcagctgacgcagccctgcgtagcccatgccgaaatcatccagcgccacccgaactccggcattgcgcagcggacggaggattgccaccgcagcatgagggtcgtcaatacgtcggctttctgtcacttccagaatcagtgttcccggctgaatgcgatagcgggttaacagttccagcatatccgccaccatattcgggtgcatcagttgcagcgcagagaggtttacgctcaagggcagcataatgccgcgctcttgccaggctgcaagcaatcgacaggactcttccagcacccagtgaccgacggtaaccatcagcccacagcactcaatgcgatcgattaagccatccggcaggtcccaactgccatccggttgctggatacgcagtaacacttccgcactgaccagtttaccgctggtcatctcgacctgtggctgtaaccaaatagcaaactgatgattttccagtgcattaaggatatcgctctcttccgtcaaccgcttctgggcggcttccatctgctgcggatcaaagaactgaatctgattcttgcctttatggcgagcggtaaatgccgcagaaatagcgcgactgtaaagctgttcggcggtgagatcgccgtagaacatcgccacgccaatgctacagtgcggacggagttgaatacgttcaatcggcaggcgctcgctcatgatagtgagcacttgctgacctaaggtgattgcgtgccacggttcctgtacaccgttggcaatgacagcaaagtcataaccgctaatctgcgcgaggatcatacgtgggctcagtacgcttttgagtttttccaccagcgtcagcagcagaatttctcgttgcgcctctttcagcacgcccgcagtatcacgcagggtttcacaggtgatgatcatcagcgcggtggtttgtttacgcgcgacaacctgctccagcatctccatcagcaaggctttgttcggcaaatcgctcaccgggaagcgcatcgcattttcgttctgttcttcataatggcgctgcagcaattgctggttgaggttgtaactgcgcaccaacataccgatttcatcgtcctgatgcagacgcggtaatgccagttggtgaccaacaagctccttggctgggatggcgttaagttcgcgagcaatattgcgtaacggatgcaaaatcaggcggttaatgcaccagctgatggcgacggtcaggataaggctcaaaagtaagtaaatggtcactaacgtactgagggtgctcatcacgaacttatacatacggaaggaatccgcctgtagtaccagataggcaattggctgcgggtttgccggacgttcgaggctgtaaacgcccaggctgatttgaaccggtagctcaaacaggcgagtaaccattaccggcaccgggcgctctggaataaaacttttacgcagcgcctggaactggttaggcagcactacatcggcacggctgaccacgcctgccggtttaatgctggcaagaatagcttccgcttcgggaatatcgcctttcaaaatagcactagataagggttcgcggacagagcgagcaatgctttccagttgcgtagccgtgttatagcgattctgctggaccagatggaacagcaaaacggtgcaaaaaataaaaacgaacaccaggacaacggctgccaccattgccatctgcttgattgttaacgagcgacttacgcgcaaattgtctccccccggaaatcccagattgccgcccgagtatacccgatcgcagcggcattaagagaggcgctatctgaaaacttaccagtcggcgtaaggtatcagcggctgcggcggtaaatccatgtcaccctgccatccggcggcggaataacgtacgtagagcaggaaatggctgggtgcgtaatctttcgcctgctggatatcaattgccgtgccaacaaaccagttggaagtaacacgtcgttcaagtaatgcccgcgccgtgtagccgaagccctgactgctgccgccatcgttggattgccgcgcagcttcttcctgccagtcggtcgggatcagattcatcagcggataacgcggcatggttttggtgcgactatggctccagctgccagacgcacccagctcccagctccagttttccgtgcgctcccgccacatcaccggtatggcaaagctcaggtattcctgcggactgtagtaaccgccctgaccgagactgtagccactcagatctttgtcgtaatgccagatcatgttgttcaggccgattgtgacgcggcgattgttctggttaatgaccttatagtaatagcccgtcatccagcgcacgcgccagttatcttcgacatttttaccggttaactggtcgccactaaggcttgcccagacgccgtttgcttcacctttatcgtagctcagacttagccccacaccgtcggcacgtacgccaccccattttttcccggtattgctcggggagtctttttgcccaccaaaggccagcaaagaactggagatgggccgacggtgggcgttaacggtgtaacccagcggcccgatatcatcgctgtaactgatgccgccgaccacatccaccacgttgaagcccatcggcgtggtaccgatatcccagctccagacgtcatttcgccagccgaccgccacgctggcaccggaatcgctctggctgcggttgccgctacagtcctgtaatgtacaggtgccccagttgtcatcccatttgccatcggcattagtggagaaactgccgacgttcatattgacgaaatcactgcgaaagaacatccgcccgtcagaatacggcgcatccacctgcaacatggtagtgtgcgctttcagatcggagtaaccaccggtgccgctgctaccccagtaatcgtgctcaagggtgacgttaagatcctgctggcgatagaggtccgccgcatcgctgcgcacgccacgtttcagccagtcatctttctcgtcgttacgggtcagtcgggtaaaggtgtcgttatcctgcggacgcgtcgtagtcacaccggatgcgaccatggcgtctttgtaggtttccagcgcctgcgttggatcgcccgcctgcgcttcaaacttcgcaccatcacgcagcaccatcgcgctttccatgctcggtggctgagattttgcctgcgggatcaacttattaaacgtccgctgcgctgctgcggtatcgccaagctgcgcctgtgccagcgccacgcgccgctgtgtgttcaggctggcgttatcggtagcgggcagtttcgccagctggctacgtgccgccgctttgtcaccggcagcaatatccacttccgtcagaccaagaatggcgtcggcgttagctggctcccgcgtcaggacattctgatatgcagcgcgggcggcggtgtaatcacgtcgttgttgcgcccagtcagccagcgtgaggtcaatacgcgtggaaggtggttgctggcgcagcatcgcttccgcttctgcctctttgccgctttctcgcaggcggttagcggtttccagcacctgatcgctttgcagtcgattaaccagctcctgaatattgctgttccactgcgcacgcggcaggctattgatatgcgccagcgccgctctgtcctggtcatgaccagagaggtacagcccgtaagcgtaaacctgctccgggtcgttgctcttctgctgcgccagattgcgcattaacgtatcggcctggctgcgttgtccggcctgccagagatcctggctaagtcggtaagtaatccatacgctgccggggtccagcgccagtcgttgccgctgaagtgctgccgcctgcgcccatttgccctggttttccagtgcctctgcctgctgtgccagacggtcgttttgcaggctgcgttcgatatcatcaatgctacgccgctgactggcagagaggctggcgataaacgcttcagctttttctgggctttgctggcggtaaatatttgccagcccgcgcacggcgttagtgttgccgctgtccatacgcaaggtctgctgataataacgttcggcggcgggataatcttttcgcgccatcgccacatcgcccagccccagcactgcataactgtcggtgttatcgacattacgcgcctgctggaacaggcgttctgcccggtcaggattattggctttcagcgcagcatcgccctgctggatcgccagccagtagcggtttactttcagcagactgttccatttgtcgttgttgctgctgtgcgggtccagtgcgagggctttttccagattcgccactgcattggcgcgatcgcctttctgagaatacgcctggcccagcgcccccagagcttcactgtctttcgggttcgcccgcaccgcctgttgtagttcgggaatggctttacccgccataccagagtccaccgccgctaaaccttgcgcacgagcgcggaaagcaggatcggccagctgtttttgctgttctgccagttggctttgcgcagccgccacgctatcgccatcactaaagatgctgagatattttttcagcgcgctcacactggcatcactgacgggcatgtctttaatctgcccgtaccagattttagaggccccttcgcgcccggcgttgctttttgccatctgttccaggacggcaaaaccttcgtcacggcgatcgctactaaacagcaatagcgccagattgttttgcaggcccgtattgcccggtgcatccgcattgatgcgttttaactgattaatcgcttcgccacggcgagccggaattttcgccaccgtactccagtactcgacagcaatgtcaccttccggcggcgcaccgttgaacagtttgttgtaactcgccacagcttcttctgcatgaccggtcgtcgcctgcaatcgtgcctgttgcagtgcctgacgaccatccggcgtggaaagtagcatcgtagtccggctgcttttatacgcattactactcggcgctaactggctcagccgatcgagctgtttttgcgcgccatcaatatcgccctgacgtaacaaagaacggaaacgggcggcaacgacgtccgggttattcggatcaataagttccagccgatataagctctgttgcaccagatcttcacgatgggtcgcttcgcctaaccgaacttgctccagcaactgttgctgagcggttggtgctgcctcgaccatcggcatgacggccagaccgagggaaagcgtgaatatgtttagtgtgaatttgcgcattcctggccccagtcaggtaattactttagtgactatttgcgcattcctggccccagtcaggtaataactcaccttttgtgctgaagcggaaacggtgttgatcccagccttgtccaaacagggtcagcacatagttgtaataggcatcgctgccgggaaagttatcggccacgcgctggcgctgaacggcctgcgcatcgcggttttgtaaaaagggcagcatggcggcagaaaaaccgactggtcctttaccctgcgctttccccgtagccacatccactttttccggcggataaccgtttttctcagtgaatgtcgccatcggtttaaaccggttgagcatccgcgctttttgcggatcgctgtcaggcatcatgcctacccacatgtaaacgcggatagcgtcgtagctgctgatcaatgttttttcggcttttagctgccagcctttgtctttctcatagcgcacccagtctgggctaaaacctttcggggcggtttccagcaataaacgttgattggtttcgcgcagcgtggtccacggcgcgccaaagcgggtgaaatactgcgccagcgtcggcggcaggtagctggggttaaaacgccagctgttatcctcagcaaaacccactttgcccggtaacaacatggaacccagcccaggcaccgtcaccacttcctcccgcgcgatacgttttagcaacgcgctgccgatgtcggtataacgctgctctttccacaaacgccccgcctccagcaagctccaggccatccagacatcaccatcggaggcgctattgctgtccagcacttcccacttactgttctctttcttgccccacagccaggcgggcaaacgttcttttaaagaaccctgagcgagattgttctgcgtccagtcgagaatattatcgaaagctgcacggtcgttagccgccagggcagagaacatgccgtaactttgcccttcggaggtggtgattttgcgcgcgtcgctggggtcgatgacgcgcccttcctgactgatgtaatcctttttaaactgctcccaggcaggccaggtacaggctgcctgaacactaaaggcagccagcagcagcatcgtcacgattccactacgcaacacattcatcttcaattactcgttatccgggttaagacgacgacgactaataattcgcagcagacgccacagtacccatgccagcaatatcacactgatagccgccagcaccgccagcagaatcggatggtttgccagcgcataccacacgcgctcgaaccacggcagatgacctacgtaataaacgtcgccaacacgtaggctgttgataccggactcgcggatcaccgcgacgctaccgaacatggtggcgcgtttgccgctatcgttcaccgcatcgttaagcatttcataaccgcgtgggctatctgccaacagcgcaatcacgctgcgctggtcgttatacgggctctggaagccaatcaccgccgccatcgcaccggaagaggtcagcgtactccgggtttctgccgcgcgatcgctctcgtccggcacaatgccggggaacggggtctggcgcatcggtgttttcacccagctttcggtcgcctgcaccaataggtcgatctgcttatcgtctttcagtttgtccgggataccaccgatgatcatgatgtcggcatctttgccctgaatggtgctgccatcatcggtcaccgtcagattaatcgccgggaagcccgtctgtgcgccgataaaaccaacagtattcagcaacgtttccatctgtgcttcgttaggcgctttcggcatcacggtgatggtttggctcagatccgccatccggctgaatgggaagcccgcgttagcaaaggcgcgtagatccggcatcgggatgaagtggtaatacttgctgaagtcgatggtggagtcgtcaccaatcaccacatgattctgcaccggctggaaggtaatacagttatccacgctaccgcccggcatcgggttcatatactcaaagtcgaagcgcagctggttggtcgcgcccagtttcagcgccggaatagagacatctgttttgccatccagcaaaccttgtaataccggaatccgcagcagcaggcggttcgcctcctgtttgctgctcaggttgaaggattgcaggaactggttattcaggctgatatccatccggctactgtctttcaccggcggcatggtgtagcggtaattaatatccatatcaatgccggtactgcgcatcaggtagagatccggcggcaggtttaggctaacgttaatcgctgctggctcaagaccgctggattgtaactgttcttcataggttttcagttcgccaaatgtgaccggacgatcggtacgtacccagttcggcgcatcgtacggcttacgcggtagcagcggtttcacttcattcactaccacgctttcaccacggaacagaatgttaccctgagcgatacctttcgctgcctgcaacaggtctttgtcgtcacgaccaaacaccaccagcagtttgacgtaaggattctgcggatggttaatcatctcaatcaccggggcttttaccgccggatgatcgcgcaggaagtccggccgtttgtcgttggttgcaaagacaatggcattgcgatccggcagttggttatagagtaccgggaagttctgcccacgccagccagaacggctaccaaaccagctggcgacaatggcagaggcttgttgcagcccaacatccggcgcacccgcaaagaccatcggcaaggtgttggtgcggttatcgctcgggtcaaagaatggcaccgggaagtgactcaggtcattcttcacattcagggtctgataggtcagatccagtccactgctccgcccaacatccagccaaagcgtggtgctggccggtttttcgcacacgtcctgataatggccgacaaactccagccgtacacggttgaagtcgctaataaacagtgggttaatgggcatttgcgccagcgtttttttacccaactgttctttggtcactggcagcacgcccatcagttcatcattgagataaacctttaactggctctggacaggcagtaagcttgggcttggggtgtattcgaagttgagcatcgccttcgtcaccacttcatcgctgcgcataccaaactcaatgctgccgttcgggttaatgccacgtagcaccatgctgcccggcggcggtgcaatttgcgcaaaggtcagcttcacatcacggctaggaccgttctgcgccacgactggcgcatcagcgccctgcacgcccggcatcacttgccccacctgcggattttgttccgtctgggcggctacagctggctcagcattgatcagtggttgcgttgctggcgtcgcctgcgtcatgaaagaggggaacgcactcatccccatagccactgcacaaatccagaatagttttcttttcatcgcgttatcatcattgttgagccaaagcctgatcgcttggttgtgccgtttcgctccgctccgggcggcgcggaataaagcttacaacccaggaaaccagagaagtcagcacacggaatatgcccttcacgctagaaggcgcaaactccgccagatggcggtagccacggaagccgagcttcagaatatccagcagactttccagcggcttatcttccgggtagctgtcctgccagagcgcccatgtatccgcacgggcaaacgtacactgcacaaaatcgatatgttgctgggtggtgagcggcattaatttcagcccaacttcattacccatcacgcgcgccacctgggtcgggaagacgtattcctgctgaccgcgtttaagcaacagattcactttctgcccttccagaatctgcgcctgaccgttgatcttgatccccaaaccaccgtcggagaaatcctgaacggtacagctgaagaggtgaccatcttcgcgggcaattgccgcgggcatcgtcatctccacgcggtggcttcggcgtacctgtttgctttctacgcttaccgcaactgcgccgccaagaacaatcaggttgtagaacacccacaccatactgacgaccacggtgagcatctcggttggcgggccatagaagtagcgccagatgcctaccgcaacgcccaccaggttgagcaggacaaggaagatgtagggccggctgatcacccagtcgacgtactcttcttccaccagtccacctttggcggtgacgttaaatttgcctttgtgcgggttaatcagcgccaccagcgtcggtggtgcgatataccacgccagcaccgtttcgtagatttcactccagaaagagtggcgatatttgccctggatcttggagttggtcaggctggcatggatcatatgcggcagcacgaatagggcgatcatcaacgctggcgcatagatgatgtaggcatgaagcagcaggaacgccagcggcgcagtcaggaagatcagccgtggaatgccgctcaagaagtggaacatggcgttgacgtaacatagccgctgagcaaacttcagccctttaccggtgagcgggttatcgagacggaagatttgtaccatcccgcgcgcccagcgaatacgctgaccgatatgcgcgctcagactttcggtcgccagccccgccgcctgcggaatacgcatatacgcggaggtatagccacgacggtgcaaccgcagagaagtatgcgcatcttcagtcacggtttcgacagcaatgccgccaatttcatccagcggcttacgacgaatcaccgcacaggaaccgcagaagaaagtggcgtcccacatatcgttgccatcctgcaccagaccatagaacagcgtgccttcgttcggcgttttacggaaacgccccaggttgcgttcaaacgggtccggactgaagaagtggtgcggcgtctgcatcatcgccagctgtttttctttcaggaaccagcccatggtcatttgcaagaagcttcgcgttggtacgtggtcgcagtcgaaaatgctcacgaactcgcctttggcatatttcagcgcattgttgatgttgcctgctttcgcatgttcatgagtggtgcgggcgatatatttcacccccacgttttgcgcaaactggcgaaactcttccctgccgccgtcatcaaggatccagatattcagcttatctttcggccagtcgatacccaggctggcgtaaatggtatttttcaccacgttgagatcttcgttgtaagtcgggacaaagatatccacgctcggccacaggctcatatctttcggcaatggcaccggctgacgattcagcggccatactacctggaagtagccgagcaccagcacaatccacgcgtacgtttcagcgaagagcagaataagcccgcacaccaggctgaccggatcgtcccagttcagcgtagaggtgtaacgccaccagatataacggcaagaaacggtcaggctcagcacaatcaacattagcgcgctgaagcgccccggcatccgccgtacgatcagcgctaccccccacagcagcatcaggaagataaactgcgccagcgggttaaacggctgagtaacgcagattaacgccagaatcaggctgaaggtgacgatgataccgaggatcaaccgccgcgccccggcactcaaatgaccgagctcttttttctcatccagatgctgtgttttatggctaacgcgctcaggcagctcgttcatccattgatggtaacgtccacgaatattttgcagaccactaaatgcccgcctgcgcggtttcggcgtttctttgcggcttgcaccgatcaataaccagcatgtttgaatgagataacggaccgggtccagcggacgcggacggctggcgttgatatgcggatacaggtttttatgttctgcgcgaatacgctgccagcgcgggtgctccagcggaataaaaatccaggccaggatcatccagaaacagccgagcgtcgcgctgaaagcgctcgcaccgtgacgacgataatcgcgataacgcccgataagccgcgcgttgaccggcgggataagcaaccaccgggtcaggatactcatgatgcactcccgactggcgtttacatcaacttgcactcccgactggcgttttcagcccggagtagttcaacaggcaccagttcgccagcgtcagtatctcttcagccgccagcgcatcactgcgatattcacctactggttgcttagccgccaggcattcagccatcgcttcatcacgatgaatgagcatcggcagtaatcggcgctggctttgcaaccaaagctggtaaatatcgtcctgaacctgactgccaatacggaagtcattaatcaaaatatgtgcgccatccggcagcgcttgctgatgcagtcggatatggcagttggcatccacattgacgattgccaggctgtgatcgcacaaactcagcagctggtgggttatctggctggcatcacgcggtaagtcgattaaaatccactggtaacgcccgctggcttttagttgctgtaagccggagcaaatatcgctcagccgggtttgccagtgctgtggattttcttgttcttcaatggataactgaccaaaaggcagcaaatcgagctggctggtgtagcgcaacccagcgtcacgccagtcctggccatccagcatcgctctggcccagccctgacggtgggtaaaatcaacattaaaactcaggcgcaacaagttgtccgggcaggcatcgaccaccaggacattttctcccaacatttgtaaactccaggctaatgcggcggtgatggttgttgtccccacgcctccccgcaccccctgctatcccagtacggccattcaccaatcccttacttttgttgcgcaaactctgccagcaacggccagcgttttaatgccgcggccaactgttcgcgttgggaaatatcggcataatcaatatcaggcagactaaatgcctgctttaacgccacaatatcattctggaagatatagcctatcgcgggatcaggcagagtatctggttcattgttattcattttgcttgatccctatgaaataaccgtaccgttcatgagacaattctaaccgtgagcatttcgccggtttattgtttacggcgagacgggaatttgctcactttttgactttccgttacgcaacagaaaaagttaaaaacgaaaagactaaaatcacacgtcttgtgaccttctaaattgattcacatgctaaatctgataagttttaatttcaatggtaggtttatttcttagctttcgctagtaaactgataatcagacaaaatggtgacatgagggacattgtggaccctgtattctctatcggtatcagtagtttatgggatgagctgcgacatatgccagcaggcggcgtctggtggtttaacgtcgatcgccatgaagatgctatcagtctggcgaatcaaacaattgcatcccaggctgaaaccgcacacgtcgcggtcattagcatggacagcgatccggcgaaaatctttcaattagatgattctcaagggccggaaaaaataaaattatttagtatgctaaatcatgaaaaaggtctatactatttgacccgtgatttgcagtgttctattgatccccataattacctttttattcttgtttgcgcaaataacgcatggcaaaacattcctgccgagcggcttcgcagttggttggataaaatgaataaatggagcaggttaaaccattgtagccttttggtaattaatcccggaaataataacgataaacaatttagtttgttgcttgaggaataccgtagtctttttggtcttgccagtttgcgttttcagggtgaccaacatttgctggatattgccttctggtgcaacgaaaaaggggtcagcgcccgtcagcagcttagcgttcagcaacaaaatggtatctggacattagttcaaagcgaagaggcggagatccaaccacgcagcgacgaaaaacgcattctgagtaatgttgctgtactggaaggtgcgccgccgctaagcgaacactggcaactgttcaacaataacgaagtcctgttcaatgaagcccgtaccgctcaggcggcgacggtggtcttttctttacagcaaaatgcgcaaatcgagccactggcccgcagcattcataccctgcgtcgccagcgcggtagtgcgatgaaaatcctcgtgcgggaaaataccgctagcctgcgcgccaccgatgaacgtttgttattggcctgcggtgcaaatatggttattccgtggaatgcgccactctcccgttgtctgacgatgatcgaaagcgtgcaagggcagaagtttagtcgctatgtgccggaagatatcactaccttgctgagtatgacccagccgctcaaactgcgtggtttccagaagtgggatgtgttctgtaatgccgtcaacaacatgatgaataaccctctattacctgcccacggtaaaggcgttctggttgccctacgtccggtaccgggtatccgcgttgaacaagccctgacgctgtgtcgccctaaccgtaccggcgatatcatgaccattggcggtaatcggctggtgctgtttctcagtttctgtcggattaacgatctggataccgcgttgaatcatattttcccattgcctactggcgacattttcagtaaccgtatggtctggtttgaagatgatcaaatcagtgccgagctggtgcagatgcgcttgcttgccccagaacaatggggcatgccgctgcctttaacgcaaagttctaaaccggtcatcaatgccgagcacgatggtcgccactggcgacgaataccagaacccatgcgactgttagatgatgctgtggagcgcagtagttgatataagatgctgtggagcgctcatcatgatgaccatcagcgatatcattgaaattattgtcgtttgcgcactgatatttttcccgctgggctatctggcgcggcactctttgcgacgcattcgcgacaccttacgtttgttctttgctaaacctcgttatgttaaaccggccgggacgttacgccgcacggaaaaagccagggcaaccaaaaaatgactcaatttacgcaaaataccgccatgccttcttccctctggcaatactggcgcggcctttccggctggaacttctattttctggttaagttcggcctgttgtgggcgggatatcttaacttccatccgctcctcaatttggtgtttgccgcgtttctgctgatgccccttccgcgctacagcctgcatcgcttgcgccactggattgccctgccgatcggctttgctttgttctggcatgacacctggttgcctggcccggaaagcataatgagccagggtagccaggtggcggggttcagtaccgattatttaatcgaccttgtcacacgctttattaactggcagatgattggggccatttttgttttattagtggcctggttattcctgagtcaatggattcgcattaccgtttttgtggttgccatactgctatggctgaacgtacttaccctggcgggaccaagtttctccttgtggccagccggacaaccgacgaccactgtaacaacgacgggtggtaacgcagcggcaaccgttgcggcgacgggtggcgcaccggtagtgggtgatatgcccgcacaaactgcaccgccaacaacggcgaaccttaacgcctggctgaataatttctataacgcggaggcgaaacgtaaaagcaccttcccgtctagcctgcccgctgatgctcagccatttgaactactggtgattaacatctgtagcctttcctggagcgatatagaagccgccgggttgatgagccatccactgtggagccatttcgatattgagttcaagaactttaactccgccacctcctacagtggcccggcggcgatccgtttactgcgcgccagctgcgggcagactagccacactaatctgtatcaaccggcaaataacgactgctatctgtttgataaccttagcaaactgggctttacccagcacctgatgatgggacataacggccagttcggcggttttttgaaagaagttcgcgaaaatggcggcatgcagagcgaattgatggatcaaacaaatctgccggttattttgctgggctttgatggtagcccggtttatgacgataccgctgtgcttaaccgctggctggacgttaccgaaaaagataaaaacagccgtagtgccacgttctacaacacgcttccactgcatgacggcaaccattatccgggggtcagcaaaacagcggattacaaagcgcgggcgcagaaattctttgatgaactggacgccttctttactgaacttgagaaaagcggtcgtaaagtgatggtggtcgtggtgccggaacacggcggcgcgctgaagggcgacagaatgcaggtatctggcctacgtgatatccctagcccgtctatcaccgacgtccccgttggggtgaaattcttcggcatgaaggcaccgcatcagggggcaccgattgtcatcgaacaaccgagcagcttcctggctatctccgatctggtggttcgcgttctcgatggcaagattttcaccgaagacaatgttgactggaaaaaactcaccagtgggttgccacaaacagcaccggtctccgagaacagtaatgcagtagttattcaataccaggataaaccgtacgttcgcctgaacggcggcgactgggtgccttacccgcagtaagaacgaaaaaggccgcagagtttcccccctgcggcctggtccgggcgcaaattgccattacggcagcctgacgcccgcatgacacgttacttccgcttgttcagccagttcacgatcatactggcaagaatgccagcaatgaccggagccgctaaatcatgccagaaggccatgcccagctctgcgaacgtcatatagccgcctgtgttgtaatgacaacgtttcgcggctattcttgagtggtctagagtcaagattagcccccgtggtgttgtcaggtgcatacctgcaacgtgcgggggttttctctctccagcaaccaatgccaccagggataaagcccccgcaacattgcgcctcaccggaacctttccggcttgccgctgattctacgattgctttttactgtcagcacccggcaatcttcctcattgcgcgatgccttccagcttaatttctttatttgcaatagttgcagttcatatccgggctgactccagactggtagtgaaatgcgcaattttgtagaattgcgcctcctcgcgacctccccagtgaatctgttgcctcattttttacatactgcgtattcgacttctccacctgttgcgcaagagaaactgggtttattcatttttgcgaggccgacttctttctggacaggactttatgcagcacaacacactaagcaaacacaatcagaaattgccgtttacacgctacgacttcggctgggttttattatgcataggcatggcgattggtgccggaaccgtgctgatgccagtacaaattggcttgaagggaatttgggtatttattaccgcagcgatcattgcttatcctgccacctgggtagtgcaggacatttatttaaaaaccctttctgaaagcgattcctgtaatgactacaccgatattatcagtcattacctggggaagaactggggaattttcctcggggttatctactttttgatgattatccacgggatttttatctactctctctccgtggttttcgacagcgccagctacctgaaaaccttcggtttaaccgatgccgatcttagtcaatctctactttataaagtcgctattttcgccgtactggtggcgattgcgtctggtggtgaacgattactgtttaagatttccgggccaatggtggtggtcaaagtagggattattgtcgtgttcggttttgcgatgatcccgcactggaatttcgccaatataaccgccttcccgcaagcctccgtctttttccgcgatgtcttgcttaccattccattttgcttcttttctgcagtatttattcaggtacttaacccaatgaatattgcctatcgtaaacgggaagcggataaagtactggcaacccggctcgcgctgcgtacccaccgaattagttatatcacgctcatcgcggtgatcctgttttttgcctttagctttaccttcagtattagccacgaagaagccgtttctgcctttgaacaaaatatcagtgcactggcgctggccgcgcaggtgatccctgggcatatcattcatatcacctctacggtgcttaatatctttgccgtactgaccgcattctttggcatttatctcggtttccacgaggccattaaaggcattattctcaatctgttaagccgaattattgataccaagaaaattaacagtcgcgtgctgactctggcgatctgcgcttttatcgtcattacgttgacgatttgggttagctttcgtgtaagcgtgctggtgttctttcagttgggaagcccgttatatggtattgtgagctgcctcattccgtttttcctgatctataaagtcgcacaactggaaaaacttcgcggatttaaagcctggctgattctgctgtacggcattttgctatgcttgagcccactgttgaagctgattgagtaaaccggagcgcatggccccggttttgtgagttaacgctgcggattttcatcctgatcaacagcaaaacaagctaccagttgaccgccgtagtcttttagctgcggctgcaactgggtgcaggggccgaagcgccgacgacagcgggcgttgaaggcgcaacccggcggtggattcagtgggcttggtagttcaccgctgagcttgatgcgctcgcggcgatcgtccgggttcaggcgcggcgtcgcggaaagtagcgcctgagtgtacggatggcgcgggttattgaagatttggtctttcgttcccttctccacgcagcggcccaggtacatcaccatcacttcatcagcaatgtgctccaccacgctcaggtcgtgggagataaagacataagacagccccaactcctgctgcaaatccatcatcagattcagcacctgcgcgcgcacactaacatccagcgcggaaaccggttcatcggcaatcaccacatccgggtcgagcatcagaccacgggcgatggcgatacgctgacgctgaccgccggagaacatatgcggatagcggtcatagtgctcggttttcaggccgactttcgccatcatgctcagggctttttcccgacgctgttctttgcttaagctggtgttgatcagcagcggctcttcaagaatttgcccgacttttttacgcggattcaggctaccgtaagggttctggaagacgatctggattttctgccgacgcagcttctgcgcctgcggatcgtgcttaagcagatcctgcccctggtaatacagctcgccaccggtgggcatttcaatcatcgtcagcaaccgaccgagggtgcttttaccgcagccagattcgcccactactgccagcgttttgccacgttcaaggttaaagctaacgccatccagcgctttaaccagacgttccggcgcgaacatgcctttcttcaccggataatgttttttcaggtcgatagcctgcaacagcggttgttgcagggtggcctcttgcgtactcatagtgtcggcctcccggcatcatcaagtgggtaatggcatttggactgacgcccgtcagcgagcatattcagcgccggttcttcagcgcgacatctgtcagtggcataggggcagcgcgggttaagcaggcagccgttcgggcggtcgtacttgccgggaacgacacctggcaagctcgccagacgttctttgtcctgagcaaattctggcagcgcacgcagcaatgcctgagtatacgggtgacgcggcgcatggaagatggcgtgcgcatcaccggtttccaccacctggcctgcatacatcacgatgattttatgtgccgcttccgccaccagcgccaggtcatgggtaattaacaccagcgccatgttctctttctgctgtagctccagcagtagttcgatgatttgcgcctgaatggtcacgtccagcgcggtggtcggttcatcggcaatcagcagttttggccgacaggcaatcgccatggcgatcatcacgcgctggctcatgccgccggaaagctgatgcgggtaaacatccagacggcttgccggatcgggaataccgacctgattcagcaggtcaatcgctcgctgacggcgggtacttttgttgccgccctgatgcaccttaatcgcttccataatctggaaacccacggtgtagcacgggttaaggctggtcatcgggtcctggaagatcatcgccacttcggcacccaccaggttgcggcgctctttttcactgatacgctgcaaatcctggccgttaaactccagtttttctgccattacgcggcccggataatcaatcagccccataatcgccagactactgacgctcttaccggagccggactcacccacaatcccgaccacttcgccctgttttacgctgtagctgatgcggtctacggcgcggaacggcgcgctttcgtcgccgaaatgcacgcttaatttatctacatttaataacgccatctcgaacctcttactgcttcagtttgggatcgagcgcgtcacgcagaccgtcacccatcaggttaaatgccagcaccgtcagcaggatcgccagacccgggaaggtcacgacccaccaggcgctttgcgcgaactgcaacacgtcggagagcatggtgccccactcaggcgttggcggctgtgcccccatgccgaggaaaccaagagcagccatatcgagaatggcgttagagaaaccgaggctcgcctgaacaatcagcggcgcaaggcagttcgggaagatgttaataaacatctgacgcatcgccccggcacccgccacgcgagacgcggtgacgtaatcgcggttaacttccaccagcacggcggcgcgggttaagcgcacatagtgcggcaaggcaacgaaggtcagtgccagcgcggcgttaccaatgctcgggccgaaaattgccaccagcaccagcgccagcagcagacttggcagcgccagcatgatatcgaccacgcgcataatgatgttatcgaccaggccgccaaagtaaccggcgatcaggccgagaataacgcccataatcaggcttaacacaactaccagacagccaaccagcaggctcaggcgcgcaccgtacatcaggcggctcagcacatcacggcctacgtcatcggtgcccagcaagtgcgccatgctgccgccttcctgccaggctggcggggcgagcagtgcatcgcggaactgttccgccgggttatagggtgcaatccagttggcaaagatcgcgatgaacagcacgatgacgacgtaaaccagcccgacgaccgcgcctttgttgcgtttaaaatagtgccagaactcctgtaacggggtcatcggcaccggtgcgctaatcactttattttcagtaacctgactcatgatgtccccttacttcttatgacgaatacgcgggttcaccacgccgtacagcagatcgaccagcaagttgacgaggataatcatcgtcgccaccagcaatacgccgccctgcactaccggatagtcgcggcgttgcagtgcgtcaatcaaccagcgtcccagaccgggccagctgaagatggtttcggtcagaatcgcccccgccagcaatgttcccacctgcaggccgataacggtcaccaccggcagcatcgcgttacgcagcgcatggacgataatcacccgcatgcgggttagccctttggcgcgcgcggtgcggatgtaatcctcgcccagcacttccagcatgctggagcgtgtcatacgcacaatgaccgccagcggaatagtacccagcacaatggcaggcaagatcatatgggcgacggcatcgataaagttgccgtcttcaccccagatggcggtgtcgattagcataaaaccggttaacggattggagtcatcgaggaacaccatatcgctcacgcgaccggagacgggcgtcaggttccagtgcacgctaaccagcatgatcagcatcatgccccaccagaagataggcatactataacctgtcagcgccaggccaaccgctgtgtgatcgaaaatggaaccgcgtttaaccgcagccagcacgccgaccggaataccgactgccgtagcaaaaatcatcgcgcagacgccaagttccagcgtggcctggaagcgcggcacgaactcttcccaaaccgggatgcggcttttcatactaatgcctagatcgccatgcataacgccccaaatgtaatggagatactgctgccacatcggtttatctaagccgagttcagccagcagctgcgcgtgacgctctggggagatcccacgttcgcccgccatgatcatcaccggatcgcccgggatcatgtggacaaaggcaaatgtgagaagggtaataccgataaacgtggggatgacgagtcccaaacgtcggagaataaactgcaacataacccggattctctatagtgacccgcagcctggaactgcgtgtctgtattgctcacaaatcaattcccgcccttatcggacagggaatgaagtattgctgccggatggcgctgcacgcagaggcacagcgccaccgggtatacagattgttgacaaagtgcgctttgtttatgccggatgcggcgttaacgccttatccggcctacaaaatcgtgcaaattcaatacattgcagaattttcgtaggcctgataagcggagcgcatcaggcatttttgcctttgccatcagtcttgtatggcttttaattattcgatagagacgttttcgaagtgatgtttgcctaatggatcaaccacatagcctttaacttctttacgtaccggttcaaacacggtggagtgagcgatgatcagtgccggagcctgatcgtgcatcaccacctgcgcttgtttgtacagttcaacgcgtttattgtggtcgtcggtagcacgcgccggttgaatcagatcttcaaacggtttgtagcaccatttactgtagttggagccttgttcagaggcggcgcagctgaacagggtggcgaagaagttatccggatccccgttatcgccagtccagcccatcattaccgtctggtgctcgccatctttcgcacgcttgaggtactcaccccattcgtaggtgacaattttggcctgcacgccgactttcgcccagtctgcctgaatcatctccgccatgcggcgagcgttcgggttatacggacgttgtaccggcatcgcccacaggtcgatggagaaacctttttccagacccgcttctttcagcaaggctttcgctttttcaggatcgtaggtgtagtcctgaacgtcgtcgttatagccccacatggttggcgggatcaggtttttcgcacttacgcccgcgccctgataaaccgctttgatgatcgcgtctttgttcaccgcgtaggtcagagcctggcgaactttcacgtcatcgagtggttttttctgcacgttatagctgagataaccgacgttcagccccggcatttccatcagattgatggatttatcctgcttcatgcgagcgatatctgccgggttcgggtacggcatcacctggcattcattcttctgcaatttcgcgtaacgcacggaagcgtcaggggtaatagagaaaaccagcgtatcgatctgcggtttggtgccccagtagccatcaaacgctttgtagcggatacgggaatctttttgatactgctgtaactggaacggaccggttccgattgggttgaggtccagtttttccggtgtaccggctttcatcatcgcatcagcatattctttactcagaatagaggcgaagtccattgccaggtcagcgaggaacggcgcttccgggcgagtcagcacaaactgaacggtgttgtcgtccacctttttcacttcactgatcagctctggcaagcccatgccttcgaagtattcgtagctgccgccagaaactttatggtacgggttttgcgcgtttttctgacgatcgaagctgaacaccacatcatcggcgttcagttcacgcgtcggtttgaattctttattgtcgtgccacttcacacctttacgcagatggaaggtataggttttaccgtcttcgctgacttcccacttttcagcgaggcccgggatcacttcggtggtgccgattttaaattcaaccagacggttataaagcgggacggaagaggcgtcataggtggtgccggaggtaaacagctgcgggttaaacccttccggagatccttcactgcaataaaccagagttttagcctgaacacttgctgcgacggtcatagccaccaggctgagaccaagcttcagcatcccactctttttcaaggaaatacgcattattctgctccaattgtgatgtttgttgttttaaccctttgcagtgggttgtcgctgcctgaccttttttgttttttgcccggtcgggtcaacgttatgaggtggggatgccgtactaattaacatcagtgtaacagtgcggatcctccataaaatgcccctcgtgacctacaatctgtcaacagaatgtgaaaacgtcaatacagccaaccgggatttacaccaacggtgagaatccacacacaaagattaaaaaaacttcaaacagctatttgcagcagagaaatttgtgctactccaacatgaccagaacaatcagcttaatatttagcaacatttggtgattaagttttatgcatttaatgaaaaaaatctgaggaaaaggtggatatctgagcgattaataccatgaacgctaaaacgcacagcggaaaatgccagggccagccataagtaacgcaaaaaaagatttaagcaaatataaaaaaagacaatggtttctgtcacaaatccgttaatggatagtgagatatggggcgcaaatttggcagggaaatgtgtgtcgtgtaggtcgaataaggcggtcgcgccgcatccgacaatggccggcacatttgcctgatgcgacgctgacgcgtcttatcaggcctacgtcgagtcgaacctccctgcccccggaggttctcatcctcatgagctgcagatgcaaaaaagcctgctcgttgagcaggcttttcgaatttggtcggtgatagaggattactcgccacttcgtggctcgccctgcgggccgttgctggcgcaacgttctctcgcttcgctcgagtcgaacctccctgcccccggaggttctcatcctcatgagctgcagatgcaaaaaagcctgctcgttgagcaggcttttcgaatttggtcggtgatagaggattcgaacctccgaccccttcgtcccgaacgaagtgcgctaccaggctgcgccaatcaccgaatgcggggcgcatcttactgcgcagatacgccctcgtcaatcccttaatagcaaaatgccttttgatcggcgagaaagtcagcaggccgcttagttagccgctgcctcttttgcctgcgggatgtgacaccagttgttgttttcgttaattccaccatccggactagtatagccaagacaacccatgatggtatcgtacagctctacgtgacggcgtggcactttcatgtcggcttcttttttcagctgcgcaaacgcctgcgcattggccggattttccagatatttatcactcatccagaccatcatcggtacgcggaactgctccggcggtgccagttcacgcggcgtgccgtgcaggtgctcgcgttcattaatactctcaccgtggtcagctgcgtagaacacaatcgctttcttatcgcgaacctgatcaatcacgctggagataaagtgatccacataggtcacgctgttgtcataggagttgatcatctgcgctttggtacagccgctatcaacaccaatacattccggcttccactgcgcgaagctacgcggataacgctgggtgtagttaaaatggctacctttggtatgcagaatgatcagatgcttaccatccgggttgcgccctaggctttgctgcatttcgtctaccagcaacatatcatctaccggcttgccacgattacgtggctccgcaccaatctgctcacgataagcaatgttgtccgccatcgtgttgctgtagaaccacatttcgctctgcatagcgtagaggtcagaactgaatcctaactgcttcagaaccgcgaaaatgttctgttcttttaatgtgcgctgcggattatcttccgcgcccccctgacgtacaaacatgcaacgcagactgagtttggttgcggtatcacaggagtaaccacggaacgccgccagatttttctcctgggccagtttcggcgtggtattacgctcatagccgaaaatacccatatggtcccaacgcgtggtttcaccgatgataaacacgacataagtgtcatcaacgttttgcggtgcctgataagtgaatttcttcgccggattaagcaaactattattatcggaagattcatcgacccgcgcccaggcatacagccccaacgcagaaagccagttacttggcagataagagttcgctacgacaccgccataactcggcaaatcaacgccggtcgccctctccactttcttctgctggatatccagcaaacgaatcggtgcccaaaccataatacccgccagtacgacgaccgccaggctgcgaatacgctgccctggggttcgcagttgtcggagcaaggtgtagcgacagcggttattccagataaggataagaggcaatgcactaacggcgattaaccagagaataaagttcagaccaacaacttctttactcaggtcgatatcggtggtcatgacggaagcgatgatgccataaccaatgaccacattaaggaaggtcatgtaatagctggcacctgcggaaaagagcaccaccaggcttgccagaatacgccagctgcggcggccaaacaggctaagaagacgtagtaaaaagaaggtcaccagtacggtggcggccagttcaacaacagcagaaatgcctttccagacggtaaaatcgtgcgcatagctgccgaagcggcggtaaaaaaccgcgccattcataaaaaggccaatatagattgcaagcaaaaagctcagcttctgctgtgtaatgcttttgatgtatctcatgcaaacaaaccctggacaaacaggtgataacaccctgcttagtggcttttcaggcccggcagggaaaaagtgcggaggtagtcagataagtaaaatctacacgcgcgaataagtagaccacagcaaagggaaaaagtgtggggaaagagtgtgcatgaagcacaaatttacaaaaatgcaagtttgaaaagagactttagcgttacaaaaagcagtaaaaagggccagttaattggcccaaattttacgagtcattgtttatacatttcgttgatgcgtttgatgcacacggaagctgaagcccagtagctcgcggctgagcattaaagggagccatgcgcctcacgcaacattttctgctctggctgacgaatcgtcgtagaaagcgccaaactcagaatcagcagggcgaaaatcacgtagaaggtcacatagaagccgccaaacagactggcgataatgctaccacaaatgctaccgataccgaaaccgagataaatcacaccgtagtttttcgccaggttattgaggccaaagaactcactgaccagactcggaaagacggtaatagtgccgccaaagttaaatgccacgcaggcaatcgctgcaaagaacgtcactgcattcaatggtgcaaacagcagggccgccatacccaccaggcttatcacctgaccaatggtaataacacggatacgggcgattttgtcagacagaatacccagcaccagacgaccactaaggttggcgatggaaataacagtgactgcattggctgcggaaaccacatcaaggtgtgccagactttgggcgatatctttcgctaccccaatcacgtacaggccgctcatgcaggcggtcaggaacattaccgctaacatccagtactgcggtttacgcatgctctctgccagcgtgtaatctttctccaccacaccattgctggttttcacttcctgttttggtgcgtctttcattaacgttgcgccgaaaacaatcatcaacagcgcaatcgctccccaaatcacaaaggttttttccagaccgaccgtttccagcagctgcgtgtcgataaatttgaaacccaggctacccagaccataagaaccgatagcgaacgcggagatcagacctttacgctccgggaaccacttcacacagttagagagcgtcagcagataacccgcgccatctgccagtcccaccagcacaccggcgcttaaccacagcatcatcaggttgtcagaatgcgctgtcaggaagaagcctaatcccagcaaaatgccggaagccatggtgacgcgtttaacgccaaaacgttcctgtaatttgcccgcaacagaagagctaattgccagccccagacttaacaagccgaaagagaaagcgacctggcttaccggcgcatccagcttggcggaaagcgcgccattaaacaggctccaggtataaacgctccccagcgcaaactgggtaatgatagtaccgatgagtgtcagccagcgggtacgctgataattactaggtgtcatggcagtattcctgcagtaataaaaaggaaaaatctctgccgacaaccataacgaagtgcactttatgcctggggaaaaacggcatgaaatgccatcagaacggaatgaaatgccttagttcaggaatgaatgacgcgacaattattcaccaaatttattatttggtaagttagcacccactatcgccacaactattgttatttaatggtttcaattgtgactgttacgttaaaatctggcgctaacccccatcgtatacagatagtcgctattattagtggtattttctgcctgagttagcgcggcataggcggcaatattttgattgagcaacatatcagcgcctacggtgacatccagccagttgccgttctggtttgtcgccgtcatccggctcaggccactttgcgccttccagatattctcgccaaattgctggttatagctgatttgcgcccagggtcggagatcgccaagccgggagtcaacacgccagcctaaggtactcacgctggcatgccataacggatcggtcagcgtggtagtactgtcgccaaactcgttatacatgctggtggttgtgccatcgtaatgtaatgccgcgaccgggccggttgtaacctgttcatataaaggaaaattccagcccatactcatactgctggtcacatccacaggggtttcttccgccagattgacttccagtcccagcgccctttggctactttgaatacgttggctcaaaatatcgttgtaatcaggttgatgatcactatcccaggtgtaacgctctgtggaaagtccgggttgcgtatcaacgatatattcttgttgccaggcgtaagctgtgttgagaaaaaaggcactgattaccacgctcgccagcaggcttagctgccagcgaccaccgcttttttttatgatcattaacacgactccagggaagagccgaattcggcaatattattgtcattgtatgaaggatatcgggcatagtagccctgtattaaatattgactttttcaccgatgcgtcaagaaaagcggctgaaatttttacgatcgggtacatagcgagggaaagtatggaacgttgcggctgggtgagtcaggacccgctttatattgcctaccatgataatgagtggggcgtgcctgaaactgacagtaaaaaactgttcgaaatgatctgccttgaagggcagcaggctggattaagctggatcaccgtcctcaaaaaacgcgaaaactatcgcgcctgctttcatcagttcgatccggtgaaggtcgcagcaatgcaggaagaggatgtcgaaagactggtacaggacgccgggattatccgccatcgagggaaaattcaggcaattattggtaatgcgcgggcgtacctgcaaatggaacagaacggcgaaccgtttgtcgactttgtctggagctttgtaaatcatcagccacaggtgacacaagccacaacgttgagcgaaattcccacatctacgtccgcctccgacgccctatctaaggcactgaaaaaacgtggttttaagtttgtcggcaccacaatctgttactcctttatgcaggcatgtgggctggtgaatgatcatgtggttggctgctgttgctatccgggaaataaaccatgattcgggaagcgcaacgtagtgaactccccgcgatcctcgaactgtggctggaaagtacaacctgggggcatccctttataaaagcgaattactggcgtgactgcattccgctggtgcgggatgcctatcttgccaacgcgcaaaactgggtctgggaagaagacggtaagcttctcggttttgtcagcattatggaaggccgatttctggcagcgatgtttgtcgcaccgaaggccgtcaggcgcggtattggtaaggcgctgatgcagtatgtgcagcagcgccatccccacctgatgctggaggtttatcaaaaaaatcaaccggcgataaatttttaccaggcacagggttttcacattgtcgattgcgcatggcaggatgaaacccaactacccacatggattatgagctggccggtggttcaaacgctgtaattaactgctggccggtggttcaaacgctgtaagtgtcagttccggaccgttgtatttttccagccatgccagcgccgtattacccgcacagccattccccagccggctgctggggagatctttggtcagcacgttcactgcgccgtttttacaaataccgtcagcggttaaatccagatccggccatgccccttcgtgaatgcaaatcacgccaggtttaattccctcgctaatgaccgctccggcaagaatttgcccgcgtgcgttccacaaccgaacagtatcgccatcttgtatgccgcgctcctgggcatcgtcaggatgaatggtgacaggctcacgatttgccaccgcgtacaattcgcgcagagaactgtaattcagctggctgtgcaggcggtgcgccggatgggcagaaagtacctgcaactgttctggttcggcattgccctgccattcgtccggctccagccacattggatgcccagggcaatccgggtaaccgtaatcggcaatacgctgactgaagatttcaatcttgccgctggcggtttttaacggatgcgccagcggatcgcggcaaaaatcagcgaagcgaataaaccgctcgctgtccgggttttccggcatctcaattaactggttggcttgccagaactcagcaaatggcggcaattcaacctgctggcttgccccgcgctgtcgggcaacgttataaaacgtttccagccattgcagctcactttttccttccgtaaaacgtgcataaccgcccttctcccagcgttcacttaactcggcaaaaacatcaaaatcattacgcgcttcatagcgtggcggcaccacttgcttcatcggcaccagatgctgattactgtaatcaccggtcatggtgagatcattacgctcaaaagaggtagtcgcaggcagaacgatatccgcgtgttttgccgccgccgtccagaagcattcagagatcaccaccagctccggtttttgccaggcacggatcaggcgattggtatcctgatgatgagtaaagttggcaccgcccgcccaccagataaaacgaatatccgggaaatgtcggttcataccgttgtgttgatatgcgccaccagggttttccagtgcttcaacaatgcgggcaacagggattttatccaccgcatcgcagccacccggcaagctgccctgcatggaagagagcaccgcagaacgccgcgtggggttaccaccattggcaaaatggtaagaaagaccaaaaccgccgccgggtgtgccgatttgccccaacattgctgccagcgtgacgatcatccagtgtttttgctcaccaaactgttggcgctgcattccccagcctgccatcagcatggtggtattttggtggaaaatagccgccagctcgcggattttcgctgcgccaacaccacaaatctctgctgcccattcggcggttttcgctattccgtcactctcgcccagcaaataagaggcgaagacggcataacctgtggtgcaacgcgccagaaacgcttcgtcgtgccaaccattttccaccagcgtatgggcgatccccagcatcagcgcaacatcggtgcccatgtgcggtgccacccactccattttatcgccaaagaaatcgacggtttcgcttcgcattggatcaatgcagatcagctttttcccgctgtcacgcagtgcagaaaagtaagaaagcccctgctcatcggatgcattccacgcaattttcagcgtattgagtgggttagcactccacagcaccacgacatcgctatgttccagcaccagcggccaactggtctgctgttgataaacttcactaccacccacgacatacggcatgatcgcctgtgccgcgccggtgctataatcccccagatgcccggtataaccgcctgccagcgccatatagcgttgtaataatgtgctggccttatgcagcacgccgttactacgccagccgtaggaaccagcaaaaatgcttgccggaccataagcctcacgaatgcgtttatgttgttggtgaataagatccagcgcctcatcccaactcacgcgaacaaattcatcctgcccacgaatgccttgcgggttttccggactcgcaagaaagccttttcgcaccattggaaatcgtacccgcgtattgctgtgaacctggtcgcgaaccgcgctctgcaaggagttttccattcctgtggctaacgcgccacggctgctaaacacggtttcgccgtcggtttcaaccagcatgggcccccaatgggcggcagtcagaacggaatatcgtgaggatgagttggccaaaccgaagactcctgaaaggttagatgtattgagcagttaaatattacttacaaatttccgagtattcccaggaataatcttcatgttcacgcggcataatctcccgccacggaacccgtggcaaagaataaaaaggttattaaggattaacaatgaagaaacgtgtttatcttattgccgccgtagtgagtggcgctctggcggtatctggctgcacaactaacccttacaccggcgaacgcgaagcaggtaaatctgctatcggcgcaggtctgggctctctcgtgggcgcgggtattggtgcgctctcttctagcaagaaagatcgcggtaaaggcgcgctgattggcgcagcagcaggcgcagctctgggcggcggcgttggttattacatggatgtgcaggaagcgaagctgcgcgacaaaatgcgcggcactggtgttagcgtaacccgcagcggggataacattatcctcaatatgccgaacaatgtgaccttcgacagcagcagcgcgaccctgaaaccggcgggcgctaacaccctgaccggcgtggcaatggtactgaaagagtatccgaaaacggcggttaacgtgattggttataccgacagcacgggtggtcacgacctgaacatgcgtctctcccagcaacgtgcggattccgttgccagcgcgttgatcacccagggcgtggacgccagccgcatccgtactcagggccttggcccggctaacccaatcgccagcaacagcaccgcagaaggtaaggcgcaaaaccgccgtgtagaaattaccttaagcccgctgtaatccctttcatgccaggtgatgcagaaatcacctggcattcttcagttttccttcatcatatttcaggctaaggtgatcgccttatcagtgaatggagagaagcatgaagccgtccgttatcctctacaaagccttacctgatgatttactgcaacgcctgcaagagcatttcaccgttcaccaggtggcaaacctcagcccacaaaccgtcgaacaaaatgcagcaatttttgccgaagctgaaggtttactgggtagtaacgagaatgtaaatgccgcattgctggaaaaaatgccgaaactgcgtgccacaagtacgatctccgtcggctatgacaattttgatgtcgatgcgcttaccgcccgaaaaattctgctgatgcacacgccaaccgtattaacagaaaccgtcgccgatacgctgatggcgctggtgttgtctaccgctcgtcgggttgtggaggtagcagaacgggtaaaagcaggcgaatggaccgcgagcataggcccggactggtacggcactgacgttcaccataaaacactgggcattgtcgggatgggacggatcggcatggcgctggcacaacgtgcgcactttggcttcaacatgcccatcctctataacgcgcgccgccaccataaagaagcagaagaacgcttcaacgcccgctactgcgatttggatactctgttacaagagagtgatttcgtttgcctgatcctgccgttaactgatgagacgcatcatctgtttggcgcagaacaattcgccaaaatgaaatcctccgccattttcattaatgccggatgtggcccggtggttgacgaaaatgcactgatcgcagcattgcagaaaggcgaaattcacgctgccgggctggatgtcttcgaacaagagccactgtccgtagatagcccgttgctcagtatggccaacgtcgtcgcagtaccgcatattggatctgccacccatgagacgcgttatggcatggccgcctgtgccgtggataatttgattgatgcgttacaaggaaaggttgagaagaactgtgtgaatccgcacgtcgcggactaagccgcgactgcgtagagtaaagcccgataatcgctcgggcttttactctttattgggttgcagtaactgctgtagtccaggcctgattaaacgcctgatgctgtgccggtaatggcgcaatcagtttgttatattcacttgcctgctgactagtcgggaactggatgccatttgcgacaaagctcacctgagtaccttgctgagcaatgtagtctccaaccatcaccagttgttgcgtgaaagtttgtgccgccggaatcaacggttgcaatgcatcagctggcgtcgttaccactttggtgaatgcctgatcaaagaccggtttcaaatcatcgctctgttttagcgcagagtgcgcagcatcggcctgcaacttcgcattttgcagttgttgcgccagcacacccaggctaccgttcatttcacgcagcggaccgctttgcgtaacgtaatcctgcggtacgcgaattgcgttaacgctgtctacaaccgggcgcagaccggaatccatcgcctgattcacctgctgagaataaccatacagaatcgcgtaatcagagacaaaaggaccaaactgttttttctgatcggcagtcagggttggtagacgttcaccgctacgcatcactgtattctgcaggaagtcgataaacgctttacgctgatcgccttctttatcaaaacacccactcaggctaactaccattaataacgccgcaagaggcgcaaaccagcgagagcaggactttcctgtcgccattttcttactcctttcacccaaaaaaagcgcacaacgacacacgcgtgtctgacgtgacaaggatagtccaggacaggcttgcaggataccctttctacgtaatcttcctggtaaaatcatggagaaaatgaaacaaggttaatttgttgtttcattgttaaaaaatgatagtgccgttgccttttttgtagccagagatttacgccttcgcagaaggttagattttcgaaatctttacaaaacaggagtggtaagagatatatcggcatttatcagatcgttaggtggctataagtcacgctaaatgacaggctgaatcgaatcatagccagagcatgccctgacttcaccccgctgtgtctgcttttcccgactattcttaatgagcttcgatgcaattcacgatcccgcagtgtgatttgaggagttttcaatggaatataaagatccaatgcatgagctgttgagcagcctggaacagattgtttttaaagatgaaacgcagaaaattaccctgacgcacagaacaacgtcctgtaccgaaattgagcagttacgaaaagggacaggattaaaaatcgatgatttcgcccgggttttgggcgtaagtgtcgccatggtaaaggaatgggaatccagacgcgtgaagcctagtagtgccgaactaaaattgatgcgtttgattcaagccaacccggcattaagtaagcagttgatggaataaacttttatccactttattgctgtttacggtcctgatgacaggaccgttttccaaccgattaatcataaatatgaaaaataattgttgcatcacccgccaatgcgtggcttaatgcacatcaacggtttgacgtacagaccattaaagcagtgtagtaaggcaagtcccttcaagagttatcgttgatacccctcgtagtgcacattcctttaacgcttcaaaatctgtaaagcacgccatatcgccgaaaggcacacttaattattaaaggtaatacactatgtccggtaaaatgactggtatcgtaaaatggttcaacgctgacaaaggcttcggcttcatcactcctgacgatggctctaaagatgtgttcgtacacttctctgctatccagaacgatggttacaaatctctggacgaaggtcagaaagtgtccttcaccatcgaaagcggcgctaaaggcccggcagctggtaacgtaaccagcctgtaatctctgcttaaaagcacagaatctaagatccctgccatttggcggggatttttttatttgttttcaggaaataaataatcgatcgcgtaataaaatctattattatttttgtgaagaataaatttgggtgcaatgagaatgcgcaacgccgtaagtaaggcgggaataatttcccgccgaagactcttactctttcaatttgcaggctaaaaacgccgccagctcataactctcctgtttaatatgcaattcacacagtgaatctcttatcatccaggtgaaaaataaaagcgtgaaacaaatcactattaaagaaagtaatctatatttctgcgcattcccagcctcctgtgttgatttccaacgagtataactttgatttatagtcaggtggggcttttctctgtctgcctttcggtgaatacctgagacaaacagtctcaagcacccgtggctattctagcttaataagtttgtttcttctccttgatataatcctaaaaaaatctcataaaattaatatatgagataatctttattcagcagaagattattaaaggttgctgtattatttagcgataaaaaaagcctgccagatggcaggctatttaataacggcgttattattgcaacaggctaatatccgcaacgcgcaggaacagttcgcgcagtttctccagcatggtcagacggttgatacgcaattctttgtcatcaaccatgaccatcactttatcgaagaaagcatcaaccggttcacgcagctcagccagttcgaccagcgcatcctggtaacgaccttccgtaaagtacggctccagcttgtcacgtagcaccacaacctgcatcgccagtttaatttcttccggctctttcagggtagaggcattcacgcggtcgctcagcacttcgtcagatttcgccagaatgttagatacacgtttgttcgccgccgccagtgcagcagctgcatccagggtacggaaatggcttaccgctttcatacgggcatcgaaatcagccggacgagtcggacgacgcgccagtaccgcctggatggtgtcaacggtataaccttcgtcctgataccaggcgcggaagcgaccgagcataaagtcgataacatcatcaactacgttggcattagtcagcttatcgccatacagacgcaccgcttcttcggtcagcgtttgcagatcaaggttgaggttcttctcaacgataattcgcagcacgccaagcgcggcacgacgcagcgcaaacgggtctttgtcgcctttcggatgctgaccgataccgaagatacccgccagggtatccatcttgtcagcaatcgccagcgcacaagctactgggttggacggcaggtcatcaccagcaaaacgcggctgatactgctcattcagcgccaccgcgacatcttccgcttcgccatcgtgacgcgcatagtgcatccccataacgccctgggtgtcggtgaactcgaagaccatgttggtcatcaggtcgcacttagacagcagacccgcacgggtagcgtggttaacgtcagcgccaatctgttcagcaatccagccagccagcgcctggatgcggtcagttttgtcgcgcagcgtccccaactgttgctggaacaacacggtttgcaggcgcggcaggttatcttcaagacgttttttacggtcggtgttgaagaagaactcggcatccgccagacgcggacgaacgactttctcgttaccggagataatctgctgcggatctttgctttcgatgttggcaacgaagataaagttcggcagcagtttgccgtcgttcgcatacaccgggaagtatttctggtcacctttcatggtgtaaaccagcgcttcagccggcaccgcgaggaatttctcttcgaattttgcggtcagaacgaccggccactccaccaggctagccacttcttccagcaggctttcgcttaagtcagcgttaccgccaatcttacgcgctgcttcttcggcatcggctttaatcttcgccttacgttcttcgtaatcggcgatgactttcccacgctcacgcagaatttccggatactgatcggcgttatcgatggtgaattccggctcgcccataaagcggtggccgcgaatcacgcgatcggactgaatgcccagaatggttgccggaatgactttgtcgcccagcagcagggtcacggtgtgcaccggacgcacgaagtgcacgtcgcttgcgccccaacgcatcagtttcgggatcggcagtttcgccagagaagtcgcaaccatattcggcagcagtgcttcggtgctttcgcccttcacatgggcgcgatacagcagccattcgcctttatcggtagtcagacgctcagcctggtcaacggtaataccgcaaccacgcgcccaaccttctgccgctttgctcggtttgccttcagcgtcgaacgcctgggcaatcgccgggccgcgtttttcgatttcacgatccggttgcgcttccgccaggttagctactttcagcgccagacgacgcggagcagcaaaccattgaacggtgccgtgtgcgaggccagcgttatccagctccgcagtaaagttcgcagcaaaggactcagccaggctgcgcagtgcttttggtggcagctcttcagtgccgatttccaccagaaaagttttctcagacatagccgcctcttacttatctttgttgcacatcgggaagccgagggcttcacgggaagcgtagtatgcttctgccactgctttggtcagggtgcgaatgcgcagaatgtagcgctgacgctcggtgacggagatggctttacgcgcatccagcaggttgaagctgtgggcggctttcagaatacgctcgtaggctggcagcggcagcggattttccagcgccagcagctgctgcgcttctttctcgtactgctcgaagcaggtgaacaggaagtccacatccgcgtattcgaagttgtaagtggactgctccacttcgttctgatggaacacgtcgccgtaggtggttttacccagcgggccgtcgctccagaccaggtcgtaaacgctgtctacgccctgaatgtacatggccagacgttccagaccgtaggtgatctcgccggtaaccggtttacactccagaccaccaacctgctggaagtaagtgaactgcgtcacttccatgccgttcagccacacttcccagcccagtccccaggcacccagcgtcgggttttcccagttatcttccacgaaacggatgtcgtgaatagtcgggtccatgcccagctctttcagagaaccgaggtacagctcctgaatattgtccgggcttggcttaatgaccacctggaactgatagtagtgctgtaaacggttggggttttcgccgtagcgaccatcggtcgggcgacgagaaggctgaacataagcagccgccatcggttctggccccagctcgcgcagacaggtcattgggtgagaggttcccgcgccgacttccatgtccaatggttgaacaatggtgcagccctggcgagcccagtaatcctgtaaggtcaggatcaagccctggaaggtcctggtatcaaacttttgcatattatttcgtgctggatacgtgtggatttaaaggaagggatcagtatacccgctggatggaagatatacagtacgaaacgggaaaaagcagggcttaacgcatggaaagatgcaaaaaatggccatccgcgtcaaaagaacagacaaactgctctttacggaaggtataaccgcgcatttcatagcttccctggaactgttcgaaggcggtgacgtcgattttttgctcgccggtgttataacgttttgccgcctgatccttgcataacgcttccatattcaagctacgcagaggatcaacctttacccgttgtgctttctgcacgggactcggtatagaacaacccactagcaccataagcgccattgccggaaagaaagcgttcatcatcattaaattaccgtctggtttgcaggtgagtcttattatttatatcggtatagtggctgatatcttacgaatttccttaagcctctataagctgtagtgataaaactcagattattccagtgcgccaaccaaatgatttatcggtcagactttttttaaccagatacagagacacagatgcagcccaaaatttactggattgataacctgcgagggatagcgtgtttaatggtggtgatgattcacaccactacctggtatgtgaccaatgctcatagtgttagccccgtcacatgggatatcgccaatgttctgaattctgcctctcgtgtcagcgtgccgctatttttcatgatttccggctatctcttttttggcgaacgcagcgcccagccgcgccatttcttgcgtatcggcttatgtctgattttttatagcgcaatcgcactgctctacattgcgctgtttacctccatcaatatggagttagcgctgaaaaacctgctgcaaaagccagtgttttaccacttgtggtttttcttcgcgattgcggtgatttatctggttagtccgctgattcaggtgaagaacgtcggcggaaaaatgttgctggtgctaatggcggtgattggcattatcgctaacccaaacacagtgccgcagaaaattgacggttttgaatggctgccaattaacttatatatcaatggcgatactttttactacattctgtatggcatgttgggccgcgctatagggatgatggacacacagcataaagcactgagctgggtgagcgccgcgctgtttgcgacgggggtttttattatctctcgcgggacattatatgaattgcagtggcgcggaaattttgccgatacctggtatctttactgtgggccgatggtttttatctgcgcaatcgcgctattgactctggttaaaaacacgctggatacgcgtaccattcgcggacttggcttaatctcccgccatagtttgggtatatacggattccacgccttgattatccatgcgctgcgcacccggggaattgagcttaaaaattggccaatactggatattatttggatcttttgcgcgacgttggcagcgagtttgttactttctatgctggtacaacgaatcgacagaaacagattagtgagttaagtaaaagcccggtcacattggactgaccgggcttacgtgagttattcgctgtattcttcctgggtaacctgtgtttcttttggtgggtttattccggcatcacgaatatttttctgcaccgctactgcaccaaacaagcttaagaagaaagccagtccataaaaacctttttcgctgagtaataatgtcgcattccacagacctaccatcagtaatgcaacagagataataaagacagtcaggcaggtcatataataaatggaagtggtcggtatgccttcatacttgtcccgaacggtcttttgataagacgccgcagaaaacagtcctaataccagtacggcaaaataatatcctttttcatttaactgcatctctgcattccatagccctaacagataggtaacgataccaccaacgagagctatccaactcacaatactaaaggccggactataggtacttattttgttgtccatcacagtattcctttcattcctgaatatgtaagagctttatgttgctcatgcgctgcgaaacaaacgcatttgaccaaacaagcagacaaaaaaggcgatgggatagatcaccatttcataagtattgataggtgcgtttaaaacaccgataaacaagagaccgatagtgattaacgcaactaactggcagatatgggtaaaaaaatcatccagttgcccgagtttttctgcgcgaagatatgcatagttgccaaaagttgctgtcattaacacgccaagaaaatagccttttccacttaacaatgggcaactgatccatagcccaaccagataaaccagcgccccgacaacaaataatagtttcgccacagtcttactggttttcataacgatctccatatctaccagcgatacattacgagtaaccaacgaaagacaaaactgaaaaatgccattaacaaatgattttcagaataaattcatactaaatattaattaattactgagatatatagatgtgaattatcccccacccggtcaggcaggggataacgtttacgccattaatggcagaagttgctgatagaggcgacggaacgtttctcgtcgtggctgataagcggcataacgctgcgcatctggtagatggctctgttctaacggtagttgcggcaacaattcaatgaggcttttctctggattcgccgcgatctgcgccagccttgctgcgcccagtgctggccccacatccccccccgtacggtaatcgagctgctgaccgctgatatccgccagcatctgacgccagtactcactacgcgccccgcccccaatcaacgtaacactttgcggtttaataccgcaggcatgcacgacatccatgccatctgccagcgcataacccacgccttccagcactgctcgcgccagttcattggggccatgttgatgagtcaaaccaaagaaaacccccttcgcctggggattattgtgtggcgtacgctcgccggaaagataaggcagaaaccaaactggctcggcactttcatcagcctgttgagctgcagcgattaaagctgggacattgctcaggccggttaatttcgcggcccaatccagacagctcgctgcactcagcatcacagacattaaatgccaacgttgcggtagcgcatggcaaaagctatgtacggcgctttctggcttgcttaagaacccttcgctgacagcaaaatagaccccgctcgtccccaggcttaacattgcctgattagcatcaaccattcccacaccaactgcaccagctgcattgtcgccaccgcctgcgacaactggcaccgtcgccataccccacgctttcgcaacttcaggtaacaaagcaccagtaatttcgctgccttcgtataatgcgggcatctggtcacgagataagtcgcaagcctgcagcatgacgtcactccagtcacgctttgcgacatccagccacatggtgccagctgcgtcagacatatcgctggcaaactcccccgtcatacgcagacgcaagtaatctttcggtaataatactttgtcgatttgacggaatatctccggctcatgccgctgaacccatagcaatttaggcgcagtaaatccgggcatcatcaggttgccggtaatcacccggctttgcggaactcgcgcttccagcaaagtgcactcttgcgcacagcgcccgtcgttccacaaaatggcagggcgtaacacccgttgctgagcatccagcaaggttgctccgtgcatctggccggcaatacccaatgctttaacgtcctgcagagaatgctgatcgcccagagctttcattgcgcgatcagttgcctgccaccactgttccgggtcttgttcgctccagagtggatgcgggcggctaacggtcagcttttccgtttgcgcagcaaccacctcaccctgctcgttgagcaaaataacttttacgccgctggtgccaagatctatcccgatatacatatcgatcgttccttaaaaaaatgcccggtatcgctaccgataaccgggccaacggactgcacagttagccgttatttgtcgaacagataatggtttaccagattttccagttgttcctggcgaccactctgatgcaccggagacaaatgatgttcctgagcatatttggctaaatctgccagactcatttggcctttcaggatttgctggcccaattcgctattccagccggaataacgctgcgcgatgcgtttatccagctcgccatcttcaatcatgcgcgctgcaattttcagcgccagtgccatcgtatccatcgcgccgatatgaccgtaaaacagatcatatttatcagtactttgacgacgtactttggcatcgaagttcagaccaccggtggtgaaaccgcctgctttgagaatttcatacatcaccagcgcattctcttccacactgttcgggaactggtcggtgtcccagcccagttgcgcatcgccacggttggcgtcgacagaaccgaacaggccaagcgcaatggcggtggctatttcatgatggaaagagtgacctgccagcgtcgcgtggttagcttcaatgttcagtttaatctctttttccagaccaaactgtttcaggaagccatagaccgtcgcggcatcgtaatcatattgatgtttggtcggttcttgcggtttcggttcgataagcaacgtgccctggaaaccgattttatgtttatgctcaaccaccatctgcataaagcggcccagttgttcacgctcctgacgcaagtcggtatttaacagcgtttcgtaaccttcacgaccgccccacaggacatagttttcaccgcccaatttatgggttgcttccatcgctgtaacaacttgcgttgccgcccagctgaagacttcaggatctgggttcgtcgccgcacccgcgccgtagcgagggtttgtaaagcagttggccgttccccacagcagcttcacgccgctctcttcttgcttgcctgccaggacatcaaccatttgcgcaaaattattgatgtactcttttaagctcgcgccctcaggggaaacatccacatcgtggaagcaataaaatggcacatgtaacttgtggaaaaactcaaatgcgacatctgctttacgcttcgccaacgccagtgcctcaccaggctgctgccacggacgattaaacgcccccacaccaaacatatccgccccgttccagcagaaggtgtgccagtagcaggcggcaaaacgcaagtgctcttccatacgcttacccaacaccagttcgtcgggattgtagtgacggaatgctaacgggttactggatttactgccttcataacgaacgcgatcgagctggtcaaaataggcttgcatattgaactccataatcaggtaatgccgcgggtgatggatgatgtcgtaatattgggcactccctttcagttgctcaattatgttatttcacactgctattgagataattcacaagtgtgcgctcgctcgcaaaataaaatggaatgatgaaactgggtaattcctcgaagagaaaaatgcaataagtacaattgcgcaacaaaagtaagatctcggtcataaatcaagaaataaaccaaaaatcgtaatcgaaagataaaaatctgtaattgttttcccctgtttagttgctaaaaattggttacgtttatcgcggtgattgttacttattaaaactgtcctctaactacagaaggccctacaccatgaaaataaagaacattctactcaccctttgcaccagtctcctgcttaccaacgttgctgcacacgccaaagaagtcaaaataggtatggcgattgatgatctccgtcttgaacgctggcaaaaagatcgagatatctttgtgaaaaaggcagaatctctcggcgcgaaagtatttgtacagtctgcaaatggcaatgaagaaacacaaatgagccagattgaaaacatgataaaccggggtgtcgatgttcttgtcattattccgtataacggtcaggtattaagtaacgttgtaaaagaagccaaacaagaaggcattaaagtattagcttacgaccgtatgattaacgatgcggatatcgatttttatatttctttcgataacgaaaaagtcggtgaactgcaggcaaaagccctggtcgatattgttccgcaaggtaattacttcctgatgggcggcagcccggtagataacaacgccaagctgttccgcgccggacaaatgaaagtgttaaaaccttacgttgattccggaaaaattaaagtcgttggtgaccaatgggttgatggctggttaccggaaaacgcattgaaaattatggaaaacgcgctaaccgccaataataacaaaattgatgctgtagttgccagtaacgatgccaccgcaggtggggcaattcaggcattaagcgcgcaaggtttaagtgggaaagtagcaatctccggccaggatgcggatctcgcaggtattaaacgtattgctgccggtacgcaaactatgacggtgtataaacctattacgttgttggcaaatactgccgcagaaattgccgttgagttgggcaatggtcaggaaccaaaagcagataccacactgaataatggcctgaaagatgtcccctcccgcctcctgacaccgatcgatgtgaataaaaacaacatcaaagatacggtaattaaagacggattccacaaagagagcgagctgtaagcgttacgccccagcgcggagcgggggcgtgatttctctccatgccgcgtgaatgaattggcttaggtggagtcgttatgccttatctacttgaaatgaagaacattaccaaaaccttcggcagtgtgaaggcgattgataacgtctgcttgcggttgaatgctggcgaaatcgtcagtctttgtggggaaaatgggtctggtaaaagtacgctgatgaaagtgctgtgtggtatttatccccatggctcctacgaaggcgaaattatttttgcgggagaagagattcaggcgagtcacatccgcgataccgaacgcaaaggtatcgccatcattcatcaggaattggccctggtgaaagaattgaccgtgctggaaaatatcttcctgggtaacgaaataacccacaatggcattatggattatgacctgatgacgctacgctgtcagaagctgctcgcacaggtcagtttatccattagtcctgatacccgcgttggcgatttagggcttgggcaacaacaactggttgaaattgccaaggcacttaataaacaggtgcgcttgttaattctcgatgaaccgacagccagtttaactgagcaggaaacgagcattttactggatattattcgcgatctacaacagcacggtatcgcctgtatttatattagccacaaactcaacgaagtcaaagcgatttccgatacgatttgcgttattcgcgacggacagcacattggtacgcgtgatgctgccggaatgagtgaagacgatattatcaccatgatggtcgggcgagagttaaccgcgctttaccctaatgaaccacataccaccggagatgaaatattacgtattgaacatctgacggcatggcatccggttaatcgtcatattaaacgagttaatgatgtcagcttttccctgaaacgtggcgaaatattgggtattgccggactcgttggtgccggacgtaccgagaccattcagtgcctgtttggtgtgtggcccggacaatgggaaggaaaaatttatattgatggcaaacaggtagatattcgtaactgtcagcaagccatcgcccaggggattgcgatggtccccgaagacagaaagcgcgacggcatcgttccggtaatggcggttggtaaaaatattaccctcgccgcactcaataaatttaccggtggcattagccagcttgatgacgcggcagagcaaaaatgtattctggaaagtatccagcaactcaaagttaaaacgagctcccccgaccttgctattggacgtttgagcggcggcaatcagcaaaaagcgatcctcgctcgctgtctgttacttaacccgcgcattctcattcttgatgaacccaccaggggtatcgatattggcgcgaaatacgagatctacaaattaattaaccaactcgtccagcagggtattgccgttattgtcatctcttccgaattacctgaagtgctcggccttagcgatcgtgtactggtgatgcatgaagggaaactaaaagccaacctgataaatcataacctgactcaggagcaggtgatggaagccgcattgaggagcgaacatcatgtcgaaaagcaatccgtctgaataacgcattgaggagcgaacatcatgagcaaaagcaatccgtctgaagtgaaattggccgtaccgacatccggtggcttctccgggctgaaaagtctgaatttgcaggtcttcgtgatgattgcagctatcatcgcaatcatgctgttctttacctggaccaccgatggtgcctacttaagcgcccgtaacgtctccaacctgttacgccagaccgcgattaccggcatcctcgcggtaggaatggtgttcgtcataatttctgctgaaatcgacctttccgtcggcagtatgatggggctgttaggtggcgtcgcggcgatttgtgacgtctggttaggctggcctttgccacttaccatcattgtgacgctggttctgggactgcttctcggtgcctggaacggatggtgggtcgcgtaccgtaaagtccctagttttattgtcaccctcgcgggcatgttggcatttcgcggcatactcattggcatcaccaacggcacgactgtatcccccaccagcgccgcgatgagtcaaattgggcaaagctatctccccgccagtaccggcttcatcattggcgcgcttggcttaatggcttttgttggttggcaatggcgcggaagaatgcgccgtcaggctttgggtttacagtctccggcctctaccgcagtagtcggtcgccaggctttaaccgctatcatcgtattaggcgcaatctggctgttgaatgattaccgtggcgttcccactcctgttctgctgctgacgttgctgttactcggcggaatgtttatggcaacgcggacggcatttggacgacgcatttatgccatcggcggcaatctggaagcagcacgtctctccgggattaacgttgaacgcaccaaacttgccgtgttcgcgattaacggattaatggtagccatcgccggattaatccttagttctcgacttggcgctggtagtccttctgcgggaaatatcgccgaactggacgcaattgcagcatgcgtgattggcggcaccagcctggctggcggtgtgggaagcgttgccggagcagtaatgggggcatttatcatggctagtctggataacggcatgagtatgatggatgtaccgaccttctggcagtatatcgttaaaggtgcgattctgttgctggcagtatggatggactccgcaaccaaacgccgttcttgattttgataaaaattttctcaaagccggttacgtattaccggttttgagtttttgcatgattcagcaggaaaagaaccatgtttactaaacgtcaccgcatcacattactgttcaatgccaataaagcctatgaccggcaggtagtagaaggcgtaggggaatatttacaggcgagtcaaagcgaatgggatattttcattgaagaagatttccgcgcccgcattgataaaatcaaggactggttaggagatggcgtcattgccgacttcgacgacaaacagatcgagcaagcgctggctgatgtcgacgtccccattgttggggttggcggcagctatcaccttgcagaaagttacccacccgttcattacattgccaccgataactatgcgctggttgaaagcgcatttttgcatttaaaagagaaaggcgttaaccgctttgctttttatggtcttccggaaagtagcggcaaacgttgggccactgagcgcgaatatgcatttcgtcagcttgtcgccgaagaaaagtatcgcggagtggtttatcaggggttagaaaccgcgccagagaactggcaacacgcgcaaaatcggctggcagactggctacaaacgctaccaccgcaaaccgggattattgccgttactgacgcccgagcgcggcatattctgcaagtatgtgaacatctacatattcccgtaccggaaaaattatgcgtgattggcatcgataacgaagaactgacccgctatctgagccgtgtcgccctttctagcgtcgctcagggcgcgcggcaaatgggctatcaggcggcaaaactgttgcatcgattattagataaagaagaaatgccgctacagcgaattttggtcccaccagttcgcgtcattgaacggcgcagtacagattatcgcagcctgaccgatcccgccgttattcaggccatgcattacattcgtaatcacgcctgtaaagggattaaagtggatcaggtactggatgcggtcgggatcagccgctccaatcttgagaagcgttttaaagaagaggtgggtgaaaccatccatgccatgattcatgccgagaagctggagaaagcgcgcagtctgctgattagtaccaccttgagcatcaatgagataagccaaatgtgcggttatccaagcctgcaatatttctactctgtttttaaaaaagcatatgacacgacgccaaaagagtatcgcgatgtaaatagcgaggtcatgttgtaacgatgatgagaattgtcggcgtcacatcaggtaacgctgcgtggttgtcggatgcggcgtgaacgccttatccgacctacccgccaggcatgataaaacgcaccaacaacgcttcaggctcgtagctcaactgcctgagacaaagtaaaaagccttatccgactgacaagtcggataaggctcaaggaaatgcaattacatatgcgccgcgattaaccgttggttatcctggtacattgcgaacaggtagttgttataactcttccctttggtgctgtagcccttcagcttgtgaatcatcgctgtggcagtcacttcctgatccgctttacgcagctgcgcacggcttttacggaagctagagtaagccgggtgcgtattcaggttagtgacataggcgctcacgctttctttgacagaactaaactgactgtaccctttcactttacctggcgcattggtacaacgtcctttcatgcatttcatgccgaacaggttgttgttgttgcgcgccagcttgctcgttccccaaccgctttctgctgcagccatcgtcgccaccatactggtggggataatgtctacgcgttcaagcaaggtattccacgggatttttcgcgtattaccggaccacttcaccttgtagcgtttggcgatgtctttcagacgcgcacgctcagcaggactccattggccctgatactgtttactaatgagccagttacgttccgcagtaatggccgcattttggctggtaatgtaaggcattacggtccggagaaacgcctttttccttggtgttccggaagggtattttcgcaaatcaggaagactactactctttgcactattgcgagaatactcttgtttactgcttacctgtttattactagctttagttaagtgggacttttgactcgctgttgttgtgtgcgtcttcgctaacacctcactgctaaacaccagagtgagtaacataagaatcatcgccccatatcgtcgtatgggagtcaaaatcatcaggtctcctggtcggatttaatcattccaacaccttatatttttcacaaatttgagagttgaatctcaaatcatatcaaaaatagctgtcaagagcaccccaaggaatagtccaaatctgaaactatgtcacgtgttaacgattcagattggcgctaaatcgcagaaaatgtgggggttatcgcaaaattcagccgttttttgcgcgagatcgctcacccttgcttctcatcctgtggacttaccgctcagggatgagttttgtttggcttatcgctggcaaactgtctgaaatcgcagcaataaggactcatccgccatgaaactcgccgcctgttttctgacactccttcctggcttcgccgttgccgccagctggacttctccggggtttcccgcctttagcgaacaggggacaggaacatttgtcagccacgcgcagttgcccaaaggtacgcgtccactaacgctaaattttgaccaacagtgctggcagcctgcggatgcgataaaactcaatcagatgctttccctgcaaccttgtagcaacacgccgcctcaatggcgattgttcagggacggcgaatatacgctgcaaatagacacccgctccggtacgccaacattgatgatttccatccagaacgccgccgaaccggtagcaagcctggtccgtgaatgcccgaaatgggatggattaccgctcacagtggatgtcagcgccactttcccggaaggagccgccgtacgggattattacagccagcaaattgcgatagtgaagaacggtcaaataatgttacaacccgctgccaccagcaacggtttactcctgctggaacgggcagaaactgacacatccgcccctttcgactggcataacgccacggtttactttgtgctgacagatcgtttcgaaaacggcgatcccagtaatgaccagagttacggacgtcataaagacggtatggcggaaattggcacttttcacggcggcgatttacgcggcctgaccaacaaactggattacctccagcagttgggcgttaatgctttatggataagcgccccatttgagcaaattcacggctgggtcggcggcggtacaaaaggcgatttcccgcattatgcctaccacggttattacacacaggactggacgaatcttgatgccaatatgggcaacgaagccgatctacggacgctggttgatagcgcacatcagcgcggtattcgtattctctttgatgtcgtgatgaaccacaccggctatgccacgctggcggatatgcaggagtatcagtttggcgcgttatatctttctggtgacgaagtgaaaaaaagcctgggtgaacgctggagcgactggaaacctgccgccgggcaaacctggcatagctttaacgattacattaatttcagcgacaaaacaggctgggataaatggtggggaaaaaactggatcagaacggatatcggcgattacgacaatcctggattcgacgatctcactatgagcctagcctttttgccggatatcaaaaccgaaagtactaccgcttctggtctgccggtgttctataaaaacaaaatggatacccacgccaaagccattgacggctatacgccgcgcgattacttaacccactggttaagtcagtgggtccgcgactatgggattgatggttttcgggtcgataccgccaaacatgttgagttgcccgcctggcagcaactgaaaaccgaagccagcgccgcgcttcgcgaatggaaaaaagctaaccccgacaaagcattagatgacaaacctttctggatgaccggtgaagcctggggccacggcgtgatgcaaagtgactactatcgccacggcttcgatgcgatgatcaatttcgattatcaggagcaggcggcgaaagcagtcgactgtctggcgcagatggatacgacctggcagcaaatggcggagaaattgcagggtttcaacgtgttgagctacctcagcagccatgatacccgcctgttccgtgaagggggcgacaaagcagcagagttattactattagcgccaggcgcggtacaaatcttttatggtgatgaatccagccgtccgttcggtcctacaggttctgatccgctgcaaggtacacgtagcgatatgaactggcaggatgttagcggtaaatctgccgccagcgtcgcgcactggcagaaaatcagccagttccgcgcccgccatcccgcaattggcgcgggcaaacaaacgacacttttgctgaagcagggctacggctttgttcgtgagcatggcgacgataaagtgctggtcgtctgggcagggcaacagtaacttttccggcttcccgttcgtcagtacctcgggaagccgccaaccaggataaaatgtcagccctaatcagcgttgcaggataaagcaccgctcactcttcaacagaccgatttgcaccccagcaaatgtagcgttattgttaccttccttgctacagagttcgacagatatcccgctatgacattctccctttttggtgacaaatttacccgccactccggcattacgctgttgatggaagatctgaacgacggtttacgcacgcctggcgcgattatgctcggcggcggtaatccggcgcagatcccggaaatgcaggactacttccagacgctactgaccgacatgctggaaagtggcaaagcgactgatgcactgtgtaactacgacggtccacaggggaaaacggagctactcacactgcttgccggaatgctgcgcgagaagttgggttgggatatcgaaccacagaatattgcactaacaaacggcagccagagcgcgtttttctacttatttaacctgtttgccggacgccgtgccgatggtcgggtcaaaaaagtgctgttcccgcttgcaccggaatacattggctatgctgacgccggactggaagaagatctgtttgtctctgcgcgtccgaatattgaactgctgccggaaggccagtttaaataccacgtcgattttgagcatctgcatattggcgaagaaaccgggatgatttgcgtctcccggccgacgaatccaacaggcaatgtgattactgacgaagagttgctgaagcttgacgcgctggcgaatcaacacggcattccgctggtgattgataacgcttatggcgtcccgttcccgggtatcatcttcagtgaagcgcgcccgctatggaatccgaatatcgtgctgtgcatgagtctttccaagctgggtctacctggctcccgctgcggcattatcatcgccaatgaaaaaatcatcaccgccatcaccaatatgaacggcattatcagcctggcacctggcggtattggtccggcgatgatgtgtgaaatgattaagcgtaacgatctgctgcgcctgtctgaaacagtcatcaaaccgttttactaccagcgtgttcaggaaactatcgccatcattcgccgctatttaccggaaaatcgctgcctgattcataaaccggaaggagccattttcctctggctatggtttaaggatttgcccattacgaccaagcagctctatcagcgcctgaaagcacgcggcgtgctgatggtgccggggcacaacttcttcccagggctggataaaccgtggccgcatacgcatcaatgtatgcgcatgaactacgtaccagagccggagaaaattgaggcgggggtgaagattctggcggaagagatagaaagagcctgggctgaaagtcactaaaaattgcctgatgcgctacgcttatcaggcctacatgatttctgcaatatattgaatttggaagaatttgtaggccggataaggcgtttacgccgcatctggcataaacaaagcgcactgttccggcgttgagaaacgccggaaaacgtttcaaacaggctgctgccgtagccgatgccgctgcactttctcgacatccatgcactgcaacgcctttgtcgggcaggcttcaacacaggccggtcccgtctcccgatgccagcacagatcgcacttaatcgccctcgcctttttgcggctagaaacgacctccatcgcaccaaacgggcaagccagcatacagcttttacagccaatgcaacgtgtttgttcaacgaaaatatgcccatgttcgcggcttatcgcgtcaacagggcagacattcgcgcacggtgcatcttcacactgatgacaggctactgccgtggtccagcagtggtctttaatgacacgaatacgggaaataaactcgtctggactcaacgcagcgcaatcctgattctcatgatggctcactgcgcaagccacttcacaggtacggcaaccgatacatttcgtcgcatccgcaataataaaccggttcatgatcactcctttgcactaaaacagcagagtgccagagagcgcgtccctactgctttgatccaacgaaggaaatgttaaagttttggcacttgtccaaagcgttatgtgatcgcgcccaggtcatccctgacagtaaatcccagttcattagaaatagcctgcgcggtttcacgcagtggtttcaggagatttttctctcccacctgtttcagacgacttgtgctaaggctaatgctcacggcgtacggcacccgcccatgaatatcaaacaccggaacagcaatacaggagacgccgagttcgttttcttctctgtccatcgccgctccgctttcacgaatgtgcgccagttcgtcgaacatcgcgggcagctcggtaatggtattgcgggttaacggctggatctcatgctgatggctttcccagtaactcttcacgtagtccgggtgaccaaacgccatgtagatcttgcccattgcggaacagtagagcggcatatgctggccaatataggcacgggttcgcagcatcccggttgtgggttccagcttataaatcaaaatagcgtgatcgtcttcgcggctggagaagttaatggtttcaccagtggcgatgttcagtgcctcaagatgcggagcggcgatatgaatgatattcaggctagacagcgccttctgcccgacggcaataaatttggtggtcaggcgataactccctgcggcaggcgcggtggtcacatagccgcaggactgtaatccctgcaataagcgatggacggtactcttatttaaaccagccagctcgctaagatgcgccaacggacaaccgtttggatagttgctcaaaatctcaatcagcatcaacccgcgaaacagactctggcttccggctggacgctctttttcctgcgccatctcgttctctttttttcccatcacttctttccccattttgtcgcgtcctgatggtagcgcaaagtgtgccgtagttcacgatctcgacagataatttataaccaattgatttttatgtcttttgaaattcatcaatcagattgccttgttaaaaagtgatcgatatatttgaaatcaagtttcgcatattgaaattttaagccaaaaaagcgatcaaaaaaacaaggaagcctgggatgaaagtgacatttgagcagttaaaagcagcctttaatcgggtcttaattagtcgcggcgttgacagcgaaacggctgacgcctgtgcagagatgttcgcccgcaccaccgaatccggcgtttattctcacggcgttaatcgtttccctcgtttcattcaacaactggaaaacggcgatatcattcctgatgcccaacccaaacgtataaccagcctcggcgcaattgaacagtgggacgcccagcgtagcatcggtaacctgacagcgaaaaagatgatggatcgcgccattgaactggctgccgatcacggtattggtctggtggcactacgtaatgccaaccactggatgcgcggcggcagctacggctggcaggcggcggaaaaaggctatattggcatttgctggaccaactccatcgccgtaatgccgccgtggggcgcaaaagagtgtcgcataggcactaacccgctgatcgtcgccattccttccacgccgatcaccatggtcgatatgagcatgagcatgttctcttacggcatgttagaagttaaccgtctggcaggtcgtcagctcccggtcgatggtggctttgatgatgagggcaatttgaccaaagaacctggcgttatcgagaagaatcgccgcattttgccgatgggctactggaaaggttctggcatgagcattgtgctggatatgatcgctactctcctttccgacggcgcatccgttgccgaagtcacccaggacaacagcgacgaatacggcattagtcaaatttttattgccattgaagtggacaagcttatcgacggtcccacccgcgatgccaagctgcaacgcatcatggattacgttactagtgccgagcgtgctgacgaaaatcaggccattcgcttacccggccatgaatttactaccctgctggccgaaaaccgccgtaacggcatcactgttgatgacagcgtgtgggccaaaatccaggcgttatgaggagataagtcatgatttttggacatatcgcgcagcccaatccgtgccgtttgcccgccgccattgaaaaggcgctcgattttctgcgcgctaccgatttcaacgccctggagccgggcgttgtcgaaatcgacggcaaaaatatttatacgcaaattatcgatttaaccacacgcgaagcggtggtaaaccgtccggaagtgcatcgtcggtatatcgatattcagtttctggcgtggggcgaagagaaaatcggcattgctattgatacgggaaataataaagtcagcgaaagtctattagagcagcgcaatattattttttatcacgacagtgaacatgaaagttttatagaaatgataccgggcagctacgcaattttctttccgcaggatgttcaccgaccaggttgtattatgcaaacagcctctgagatacgaaaaattgtggttaaagtcgcattaacggcgctgaattaatcgaataatcgtctacgccagaacgcctgggtaatgttattgctctaactatattaataattcaggttgctgcacatgcgacttgaattatgacagacatagcctcaaggaatagctatgaaaaaaatactcgaagcaatactggcgattaatctcgccgtactttcctgtattgtatttataaacattattttaagatatggttttcagacaagcattttatctgttgatgaattgagtcgttatttatttgtctggttaacgtttattggcgcgattgtagcttttatggataacgcccacgttcaggtcacctttctggtggagaaactctcccccgcatggcagcgacgagtcgctctggttacccattccttaatcttatttatttgtggcgcactggcctggggcgcaacgctaaaaacaattcaggactggagcgattatagtccgatcctcggtttacccatcggcctgatgtatgccgcttgtctgcccaccagcctcgttatcgcattctttgaactgcgtcatttatatcaactcatcacgcgtagcaattctctaacgagcccaccgcaaggagcttaatcatggctgtgctgatttttctgggctgtctgttgggtggtattgctatcggtttgcctattgcctgggcactgttgttgtgcggggcggcgttaatgttctggctggacatgtttgatgtccagatcatggcacaaacgctggtgaacggagccgatagcttctccctgctggcgattccgttctttgtgctggcgggtgaaatcatgaatgcgggcggcttgagtaaacgcattgttgacctgccgatgaaactggtggggcataaaccaggcgggctgggctacgtcggcgtgctggcagctatgattatggcgagcctttctggttctgccgttgcggataccgccgccgttgccgctctactggtgccgatgatgcgcagcgccaactatccggtcaaccgggcggcggggctgattgcctctggcggcattatcgcgccaattattcccccttccattccgtttattatcttcggcgtttccagcggattatccatcagtaagctgtttatggcgggcattgcccctggcatgatgatgggcgcaacgctgatgcttacctggtggtggcaggccagtcgccttaatttaccccgccagcaaaaagcaacgatgcaggaaatctggcactcttttgtctccggtatctgggcgctgtttcttccagtcatcattattggcgggtttcgctccggcctgtttacccctaccgaagccggggccgttgctgctttctatgcgctgtttgtcgccacagttatttaccgtgaaatgaccttcgccacactttggcatgtactcattggcgcggcgaaaaccaccagtgtggttatgtttctggtggccagcgcacaagtttccgcctggctgattaccattgctgaactgccgatgatggtttctgatttactgcaaccgttggtcgatagtccgcgtctgctgtttatcgtcattatggtggctatcctgattgtcggcatggtcatggatttaacgccgacggtattaattcttaccccggtattaatgcctttagttaaagaggcaggaatcgatccgatttatttcggtgtcatgtttatcattaactgcagtatcggcttaattacaccgcctatcggtaatgtacttaacgttattagtggggtggcaaaactcaaattcgatgatgcagtcagaggcgttttcccttacgtcctggttttatatagtttattagtcgtatttgtttttattcccgatctcatcatcctccctttgaaatggattaattaaaaggaaaatattatgaaattacgctctgtaacctacgcattattcattgctggcctggctgcattcagcacatcttctctggcggcacaatctttacgtttcggttatgaaacaagtcaaaccgacagccaacatattgcggcgaaaaaattcaatgatttattgcaggagagaaccaaaggcgagctgaaattaaaactgttcccggacagcactctcggtaacgcgcaggcgatgatcagcggcgtacgtggcggcaccatcgatatggaaatgtccggcagcaataactttgccgggttaagtccagtgatgaacttgcttgatgtccctttcctgttccgcgataccgctcacgcgcataaaacgctcgacggcaaagtcggtgatgatctgaaagccagtcttgaaggtaaaggactgaaagtactggcctactgggaaaacggctggcgcgatgtcaccaacagccgcgcaccggttaaaacccccgccgacctgaaagggctgaaaatccgcaccaacaatagcccgatgaatatcgccgcattcaaagtctttggcgctaacccgatcccgatgccgtttgccgaagtctataccgggctggaaacccgcactatcgacgctcaggaacacccgatcaacgtcgtctggagtgcaaaatttttcgaagtgcagaagttcctttctctgacgcaccacgcctattccccgcttctggtggtgatcaacaaagcgaagtttgatggcttaagtccggagttccagcaggcgctagttagttctgcacaagaagcgggtaactatcagcgcaaactggttgctgaagatcagcaaaaaatcatcgacggcatgaaagaagcgggcgtggaagtcatcaccgatctcgaccgcaaagcctttagcgacgcactggggaatcaggttcgcgacatgtttgttaaagatgtgccgcagggagctgatctgctgaaagccgtggatgaggtgcaataaaccatgacgcaatactggctggggttagattgtggcggtagctggctgaaagccgggctgtatgaccgcgaaggccgggaggcaggcgtgcagcgcctgccgctgtgcgcattaagcccgcagccaggctgggcagagcgcgatatggcagaactgtggcaatgctgcatggctgtcattcgcgccctgcttactcattctggtgttagcggggaacaaattgtcggtatcggcatctccgcacagggaaagggcttgtttttgctggataaaaacgacaaaccgctcgggaatgctattttgtccagcgaccgccgggcgatggaaatcgttcgtcgctggcaggaagatggcatcccggaaaaactctacccgctgacccgacaaaccttgtggaccgggcatccggtgagcctgttacgctggctgaaagagcacgaaccagaacgctacgcgcaaattggctgcgtgatgatgacgcacgactacctgcgctggtgtttaactggcgtcaaaggctgtgaagagagcaatatttccgagtccaacctctacaacatgagtcttggggaatatgacccgtgcctcaccgactggctggggatcgctgaaatcaatcacgccctgccgcctgttgtcggatctgccgaaatctgcggggagatcaccgctcagacagccgccctgaccggtctgaaagcgggtacgcccgttgttggcggcctgtttgatgtggtttccaccgcactctgcgccgggatcgaagacgaatttaccctcaatgcggtgatggggacctgggcggtgaccagcggcataacccgcggtttacgtgacggtgaagcgcatccgtatgtctatggtcgctacgttaacgatggtgaatttatcgttcacgaagccagccctacctcttccggcaacctcgaatggtttaccgcacagtggggagaaatcagctttgatgagatcaatcaggccgttgccagcttgccgaaggctgggggcgatctctttttcctgccgttcctgtacggcagcaacgccggactcgagatgaccagtggtttctacgggatgcaggccattcacacccgcgcgcacctgttgcaggccatctatgaaggggtggtgttcagccatatgacccacctcaaccgaatgcgcgaacgttttactgatgttcacaccctacgcgtcactggcggcccggcgcactccgatgtctggatgcaaatgctggcggacgtcagcggtctgcgtatcgagctgccgcaggtggaagaaaccggctgctttggtgcggcccttgccgcccgcgtcggcaccggggtttatcacaacttcagcgaagcccaacgtgacttgcgacacccggtgcgcaccctgctgccagatatgaccgcccatcagctttaccaaaaaaaatatcaacgttatcagcatctcattgccgcacttcagggctttcacgcccgcattaaggagcacacattatgagccgaccacttctgcaactggccctcgaccacagtagtcttgaagccgcgcagcgcgacgtgacgctgttaaaagacagcgtcgatatcgtcgaagcgggcaccattctctgtttaaacgaagggcttggcgcggtgaaagccttgcgcgaacagtgcccggacaaaatcatcgttgctgactggaaggtcgccgacgctggtgaaacgctcgcgcaacaggcgtttggcgcaggcgctaactggatgaccatcatctgcgccgcgccgctcgcgacggtagaaaaaggccacgcaatggcacaacgctgcgggggtgaaattcagatagagctgttcggtaactggacgctggacgacgcccgcgactggcatcgtattggcgtgcggcaggccatttatcatcgcggtcgtgatgcacaggccagcgggcaacagtggggcgaagccgatctggcacgcatgaaggcgcttagtgatatcggccttgagctttccattactggcgggattacccctgctgacctgccgctgtttaaagatatccgcgtgaaagcgtttattgccgggcgggcactggcaggcgcggcaaatccggcgcaagtggctggcgatttccatgcgcaaatcgacgctatctggggaggtgcgcgtgcgtaatcatcagttagggatttatgaaaaagcgctggcgaaagatctctcctggccggagcggctggtgctggcaaaaagctgcggttttgattttgtcgaaatgagcgtggatgaaaccgacgaacggctcagtcgtcttgactggagcgccgcacaaaggactagcctggttgccgcgatgatcgaaacaggtgttgggatcccgagcatgtgcctgtccgcacatcgtcgctttccctttggtagccgtgacgaggcagtgcgcgaacgggcgcgggaaatcatgagtaaagcgattcgcctggcgcgcgatctcggcattcgcaccatccagctggcaggttatgacgtctattacgaagaccacgacgaaggcacccggcaacgttttgctgaagggctggcgtgggcagtcgaacaggcggcggcaagtcaagtaatgctggcggtggagattatggataccgcgtttatgaactccatcagcaaatggaaaaaatgggacgagatgctcgccagtccgtggttcaccgtctacccggacgtcggcaacctcagcgcctggggcaatgatgttcccgccgaactgaaactgggcattgaccgtatcgccgcgatccacctgaaagacacccagccagtcaccgggcaaagtcccggacagttccgcgacgtgccgtttggcgaaggctgcgtcgatttcgttggcatcttcaaaacgctgcataaactgaactatcgcggttctttcctgattgagatgtggaccgaaaaagccaaagagccggtgctggagattattcaggcgcggcgttggattgaagcgcgtatgcaggaggctggatttatatgttaacgtaaatgcaggaggctggatttatatgttagagcaactgaaagccgacgtgctggcggcgaatctggcgcttcccgctcaccatctggtgacgttcacctggggcaatgtcagcgcggtagacgaaacgcggcaatggatggtaatcaaaccttccggcgtcgagtacgacgtgatgaccgccgacgatatggtggtggttgagatagccagcggtaaggtggtggaaggcagcaaaaaaccctcttccgatacaccaacgcatctggcgctctaccgtcgctatgccgaaattggcggtattgtgcatacccacagccgccacgccaccatctggagtcaggccgggctggatctccccgcctggggcaccacccacgccgattatttttacggtgccatcccctgcacgcgacagatgaccgcagaggagattaacggcgaatatgaatatcagaccggcgaagtgatcattgaaaccttcgaagaacgtggcaggagtccggcacaaatcccggcggtgctggtgcattctcacggcccgttcgcatggggtaaaaacgccgccgatgccgtgcataacgccgtagtactcgaagaatgcgcctatatgggtctattcagccgccagcttgcgccgcagctccctgcgatgcaaaacgaactgctggataagcactacctgcgtaagcatggggccaatgcctattacgggcagtaatccctcacgccggggcttcatcgccccggcactacgaattgatatgttccttgctgtaacgccgcttccacgctgctggcgttaaaccagtatgtttctgaaaaatctgccggaaatagccaacgtcattaaaccgtattgcatggagcaggccgacaacgtcgagtcactgcataacctgttgctgcccgccgatgcgccatttacgacatttgaaggcaagggattgttcagccataagatcctgattcagacgccaggttcccggtatgaacagagcaatccagagcaacaacctttgtggcattacgacggagcaccagccgcaccgacatccaccggtgaattaaaaacgccagctcaccccggtgacaaaggtaaaactctcattacgatcaatcatcgggctgtcggtaatctcttccggcagctcgctgtatcctgcgctcgccatcaatacgacgtgctctcctatcgggtattttgccgtcaggctgacatagggcacccaggcatcctgcgcggaataacttgccagaccgctacgacgggactcactctcactaatgccatagtaatagtcactgaaattctcgtcataatagagaacgcccagcgcaggtgtcaggctcagacgacctatctgcattttgtggaatacgcttagctcccccacccagccgttgctgttatccagaacgtccgcagctgcagaggctttcacggttccccaacgctcgtggtgataccaggcaacccccgccatagccgtactatcacgcttatcaagctgttgcatggcataatcgtcattatcggtagggtcaaattccagcggcatccaggatgcggtcaggctaagttcatttttttcactttggctcagaataaaacctaacgtggtctgacgaacataaaaagtatcaccttcataactaatcagcggaattgccttcgtattttcattataaccgcgataagggctttcattataagccgcaccagcaccaatggataattcagaagcagttgcgcttgccataaaaggcaacgcaaataacgccacaatattgcgattaattaacatgtccggtattccattttaaaataagataaaaaagagtcggcataataatgcttacaatttctccggtgcaagattcatatttatatagtaatatataaaattatatataattgggctgttgcgatgacaaaattacaacttaagtaccgggagttaaaaattatcagcgtaatcgctgccagtgaaaatatcagccatgccgcgactgtacttggcatcgcacaggccaacgtcagcaaatatcttgctgattttgaaagtaaagtgggtttaaaagtctttgaccgaaccacccggcagctgatgctcacaccttttggcaccgcgctgttaccgtacatcaacgacatgctggacagaaacgagcaacttaataattttattgcagattataagcatgagaaacgtggtcgggtcaccatctacgccccaaccggcataattacctatttatccaaacatgtaatcgataaaattaaagatatcggtgatatcaccttaagcctaaaaacctgcaatcttgagcgtaatgccttttatgaaggcgtcgaatttcctgatgattgtgatgttttaatcagctacgctccaccaaaagatgaaagcctggttgccagttttattacccaatatgccgtaaccgcttatgccagccagcgctatcttgagaaacatcccattagccgtcctgacgaactcgaacatcactcctgtattttgatcgacagcatgatgatcgacgacgcgaatatctggcgcttcaacgtcgccgggagtaaagaggtgcgggattatcgcgtgaagggaaattacgtttgcgacaacacgcaatctgcgctggagctggcacgaaatcacctggggattgtgtttgcgccagacaaaagtgtgcagagcgacctgcaagacggcacgctggtgccctgctttcagcaaccctatgaatggtggctggatctggtggctatcttccgtaaacgggaataccagccctggcgggtccagtatgtgctggatgaaatgctgcgtgaaattcgccaccagcttgctcagagccagcaactgcggcctgaacaagcggcggaaagcgaagattaatgatcgagataaaggtaatgcacccagctggtcatgcgtaatagcactttgcgcatcacgctgacatggctgaaatgatcagagtaaaccgccacctgggcgtaaataccgtctggtaaagcgctcaaatcagtgtgctcatccagttcaatggtcgcgataacgccatcactacccggcgctgtgtttaacgtctgtaaggtgccggtgctctgataagctccgccgggaacggctggactaatggctgccagcttaccgctgaataccttacctggcagagcattaaacaccacttccgcatcgtcgccaggagccagtcgcagcaaggagttctgacggaactgcgccacgatttgtcgtttctgatcgggtataaacaccatcaccggacgtagcggcaggctcgcggcataggtacccggacgaatcagtacctgggtcacataaccatcgctcggcgcacgcactatcgtctgctcaaggttatattttgcttccgcgagctgtgctttcaggctggcgatttgagaatgttcacccaacaccaggctatccagctggctctggatctgtttttgttccgccgcgctactcttcacggaggcttcctgcgccagataattttgccgcgccacatcgatatcgcgttcactaaacgggtttactttcgcctggctgccacgtgcgtaacgctgatactctttagcgaatttatcccgcgtggcctttgcctgctgagtattcgccgccatctcatctaactctgcgcccaacgcccgctgtttatgttctgcggtaacgatatccgccatcagccgatccacccgcgcctgataacgcgtcgggtccagtcgaaatagcacctcaccttttttaatcagcgtatttttcttatccgtcacttcaatcaccacaccagtcacctgtgggacaacaggaatagaaataaccgctttttgcgctttaaaggtatacggatggttatagttcattaacagaattagaccgctgacaataaatattccacccagggccgctgtgggaatggtccatttatttacgggaattttgaagatcttaaacattgcccatgcaaaagccacataggtcaaaataatcagtaaatccataagtattactcggcagaagaggatttgatgtcggcgagctgtttctccagcccggcaatgcgctgttgcagttgcataacggaactatcatggctttgcattccccatccccgctccgggcggtaaagcgtggcccaaatccacaaaaacggccagataacatgtaacgtaaaaagactcacccaaccagcaacatgaatggcgtcggcatgaggatgattacgttttttggcaatcaggtagggaatatcatgtaaaataatgatcccatagaagatcaccagaaatacaaaaataagcactcccagtgcaaaatagtccaggaacatatttccctcaaagaatataaaaaagaacaattaacgcatattatgaaatgccatgatgcagtgcaatttccttatttatataacgacatattgttttttatatactttcttaaatgtgctgtctggtttttcaacaggacgaggtttatcatattgaaatagtggaactattggccaaactaatgaataactccagtaaaacatccacagtacagattaagcgtattaaaccttcaattatctaccgtttattgctgattggcctcggatcaccaatggtgatttacggcctggttcgcccgctcaccatcgaaacgcgagattaaactcctgacaaaacacgccccagaaacgtacttctgttggcgtagtctgggttattgcgcacgtaggtttaaaacgtaaattgtaacaacgtgcgctttgtttatgccggatgcggcgtgtacgccttatccggcctacggtcaggttcccgtaggcatgataagacgcgtaagcgtcgcatcaggcaatgaatacccaatgcgaccagcttcttatatcagaacagccccaacggtttatcgctgtagctcaccagcaggcacttggtttgctggtaatgctccagcatcatcttgtgggtttcgcgaccgataccactttgtttgtagccaccaaacgccgcatgtgccgggtaagcgtgataacagttggtccacacgcgcccagcctgtatgccgcgccccatcttataggccagattaccgttgcggctccagacgcccgcgcccaggccatattgcgtatcgttcgccagctccagcgcttcttccatcgttttgaaggtggtcaccgccagcaccgggccaaaaatctcctcctggaacacccgcatattgttctgaccaaacagaatcgtcggttcgaggtagtagccgtctttcagttcaccttccagcagcttgcgccgcccgcctgtgagcacgtcagcgccctcttttttaccgatatcaatgtagttgaggatggtttccagttgcccgtgagaaacctgcgcgcccatttgcgtcacgctgtcgagcgggttaccgctacgaatgctttcgacacggcggatggcgcgttccataaagcgttcgtagatagattcctgcactaaagcacgactcggacaggtgcaaacttcgccctggttaaaggcaaacagtgcaaagccttccagcgctttatcgaaaaaggcatcttcttcatccatcacatcagcaaagaagatatttgggctcttaccgcccaactccagcgtcaccggaataatgttttgcgttgcgtattgcataatttgttggcccacttccgtactgccggtaaacgccactttggcgatgcgtttgctggtcgccagatattcgccaattaccccacctgcgccattgaccacgttcaccacgcccggcggcagtaaatcaccgacaatttccattagcagcagtacagaaagcggggtaagacgtgcgggtttcagcaccacacagttgcccgccgccagcgcgggagccattttccagctcgccatcagcagcgggaagttccacgggataatctgccccaccacgcctaacggttcatggaaatgataggccacggtttcgctatcaacttcactgatcccaccttcctgcgcccgaatacagctggcgaaatagcggaaatggtcaatcgccagcggtacatccgcagcactggtttcgcgaatgggtttgccgttatcccaggtttcagctgtcgctaacagctcgaggttttgttccattcgatcggcaatcttaaacagaatcgccgcacgatcctgcacgctggtgtgcgcccatttatctttcactttgtgcgcagcatccagcgccagatcgatgtctcgtttgccgctagacgccacttcgcacagcagctgcccggtcaccggcgtcagattctggtaatactcgccgtcggcaggggctacccattcgccgccaataaagttgtcatagcgggcttttaacttgagggggaaaccatactcgccgggcttaatctgtgcactagggggattattggtcatgatcgtctccttgcggtgtgaggtataacaagggtagacgtgactggcgaaatcttcgccagtcggtaacagctttacgacagctatcacgaatttacgggcaagggttacagagatagttgaaaaagcggctaacaatttgccagccgttgtggaaatgatgattacatcgctgcgcgataaatcgccacaatttcttcgtgagttgcctggatcgggttagtaaagccacaggcatctttcagggcattagtcgccaataccgcgaaatcttcttctttcacgttcaggtcgcgtaggcctgccgggatatccactttcttcgccagttcacggatggcgttaatgcaggcttcagcaccttccgcgtcgtttttacctgtcacgttcacgcccattgcagcggcacagtcacgcagacgtgcagcggcgactttgctgttgaatacctgaacgtgcggcagcaaaacggcgttacatacaccgtgtggcaggttgtagaaaccgcccagctggtgcgccatcgcatgaacataacccagagaagcattattgaacgccataccggcgaggaactgggcataagccattgcttcacgcgctttcgcattactgccatcttcaacggctaacggcaggttttcggcaatcatggtcacggctttcagtgcacaagcgtcagtgatcggcgtggcggcaatagaaacatatgcttcgatagcgtgcgttaaggcatccatacccgttgcggcggtcagactcttcggcataccaatcatcagagaggagtcattgacagaaagcagcggagtgacatgtttatcaacaatcgccattttgatatgacgcgcttcgtcagtgatgatgcagaaacgggtcatttcagaggccgtacccgccgtggtattgatggcgatcatcggcagctgcggttttgcagagcggtcaacgccttcgtaatcgcgaatatcgccgccattggctgccaccagcgcaataccttttgcgcagtcgtgtggagaaccaccgcctaaggagatcacgctatcgcaattattctctttaagtaatttcaaacctgcggcgacgttttccgtggtggggttaggttgggtgccatcataaataacgctaaaaatattgcgttcttccagtgctttttgcacatcgcccgccatacctaatttcgttaacatattgtcagtgacaattaaggtacgggtaaatccataatctgccatcatattcattgcatcagtcaaactatcagcgccgatgacattcacagaaggaataaagaacgtactagctgccataacacactcctgaaagtgtaaaaaagggcgggcagcttactgaggattttcattcgaaaatatgatcagtattattgattatcaaaattaatctaataaaaagcacattgtattcattaaacaatgtgctttttttaaattcataagaattttgtattaatttattttaaaacttaattaatcatttccttatttttccggaaataataatgcgtcgcgcaataaatgatcatttccacgacgacgcgtaaagccaatgcggtcaaaatattccagaatctgaattgccagctttcggcctacgcctaagcgatcgcggaaatccgccgcgcaggtactaccacactcctgatcgagatcgcggatcatattggcaaactcgacaatccgatcgttacggtaataacgatctttaacgatcgcggtaattattccttgctgcgccgcctggcgtagagtcaggcgcattgcctgctcgtcggttcccgtctcttttgccaggtcacgcacccaccacggttcgtcaccaaacagtggctctgctttttgccagatggcctgctgctcttcgctgaagcccgctttgtgatctggcagatgcagccagccgtgatggctgtggatgtcgccgctttcgcgcatcttttcaatcagcaacagtaccagcgcttcatcttccattggcaacgccatacgtcgcagacgttcgcgcccagggccaggttcatcgcgatgttgctcatgataagtcgctaatgtgtcgagaattttccgctgccagcgggcggcaaccggcgcattcaacaagctataaccagcctgaatataaccaggctgttgcagcaattcgcgcatcccttcgccgttgagctggcgcgcccaggcgaaatccgcaaggttaaccgcgccgcgttccagatgaacagataacgcatcggcatcgctctgcgcccgtgcaagagacgccagccattgcagatattccggcttacgtttaccgcgacgcggcgggttaagcatcacgacgcgcgctccggccagcgtgttgcgggcagagatatcgcgcaataccaggcggtcgttatctgccagccataacggggtgtcgaagaccagttcagcaaggttatcttccagcagactaacgcgtcccgtgacgtggctggcggcgtggtgaatatgcagcggctgccactgggtcagcggtgtatgggtttgaagctcgacaatcacccgtgtgaacggctctggcggcacatcggcaagcagccagtcgccacggttaatctgctctttttccgcatcacccgcgatgttaagcgcgatacgctgcccggcattggcggtttctgttggctggttttgcgcatgcagcgcacgtacacgcatcggtttatttacaccagtcagccagagactatcgcctaccttcacttccccgcttaacgccgtaccggtgacgaccagcccggcaccttttacggtaaatgcgcggtcaatcgcgaggcggaaactatgttggctggcgtgctcgcgttccggcaactgaagcagatgctcgcgcagggcatccattccccgaccttcggttgctgcggtgataaacagttttgcctcagcaaaaccgtattcccgcagaacctcctttacctggcgttcaacctcatcaacacgcgcttcgtccacgcgatcggctttggtcagcgccactgtcagcatcgggttaccggtcagctgcaaaatcgccagatgctcacgggtctgtgccatcacgccgtcatcgcacgccaccaccaacagcgcgtgatcgataccaccaacgcccgccagcatgttggaaagaaacttttcatgaccgggaacgtcgataaaaccaggcacgcgaccatccggctgcggccagtaggcatagccgagatcgatggtcatgccgcgctttttttcttccggcagacggtcagcatttacgccagtaatcgcctgcaataaggttgttttgccgtggtcaacgtgtccggcagtcgcaataatcatttcaacaacatctccaaaaaccgttgctcatcttcaaggcagcgtaaatccagccacaatcgtccgtcataaatacgaccaatcaccggcactggcaattcacgccagcgggcggctaaactctcaaggtggctaccgcgtccatcatggggtgtaaacgttaatgccgcgctcggcaggcgatcaaccggcaggctaccactgccaatctggctaagacatggcataacctgtaccgcaaactccgcgccgtaatgtgcggcaaggggggcctgtaaacgttgtgcctggatttgaatgacctctgcgctgcgggtaagcaggcgcagggtcggtaatttttcactcagagcttcagggtgtaaataaagacgcaacgtggcttccagcgccgcgagggtcattttatccgcgcgtaatgcacgcttcagcgggtggctttgcaggcgggcgatcatctcttttttaccaacaataattcctgcctgcggcccgcctaacaacttgtcgccggagaaactcaccagactgacgcccgccgcaatcaactcctgcggcattggctctttcggcaaaccgtactggctaagatcgaccaggctgccactgcctaaatcagtcactacgggaacatccagctctttgccgagcgccaccagttccgcttcatctatcgctttggtgaacccctgaatgctgtagttactggtatgtactttcatcaacagtgcggtattttcattcaccgcctgacgataatcattcgcgtgcgtgcggttggtggtccctacttcgtgtagggtgcagcctgcctgacgcataacatcgggaatacgaaacgcgccgccaatctccaccagttcgccgcgagataccaccacctcttttccgctggcagtggccgccaacatcaataacaccgccgccgcattgttattgacgatacaggcatcttccgcccccgtaatacggcacagcagctgcgccagcgcccgatcgcgatgtccgcgtccggcgtcgtccagatcatactcgagggtcactgggctacgcatagcctgcgcaacggcttccaccgcggcttccgcctgtaaagctcgcccaaggttggtatgcagcacggttcccgtcaggttgatcaccggacgcagcgcgctctgcgcttctttcgtcaaccgggcatcgacttcttgcgcccagttttcacaccacgcaggcagcgtctggctgccacgaatcacttctcgcgcttcgtcgagcatctgacgcaacaattccaccacgcgggtgtgaccataagtatcacgcaaagaaaggaaggagctatcgcgcaataagcgatcaatagccggaagttgactatagagggaacgcgtttcggttgtcataggaaacctggctgatcaaggccctctcacacggagaagggcgtttaacataaccacggattgtaacgtgagatgggtcaggaggacatatcgcgcatcaagcctttggcggttcggtgcgagcaaaactttcgcggctaaacaggttttcgaccagtttgactaagtgtgggcggtcgacacaccaacctggcgcaacgcggcggaaattgagatatccgacggcacaggcaatggcgatagtcgccagattgaccgtatcggttttgagtgtgccatcgaccagatatccttccagcacatccagactgcggttgattttctcccgctggcgtaacaattcatcttcagactgctgcgccgctggacgcgcctgttcacgcacgcttaccagcccggcatccataatgccatccgccagtgcctcaattttgcgcacccgcaagctctccagcggatcgcgcggcaacatcgccggagcgacattcattaattcaatatattcagcgatgatcgggctatcaaaccagcattcgccctcttcggtcaccagcaccggcacttttcctaacgggttaaattgcgccacgccgttgtccgcgttatagggcagttcattaataaattcgaaagttatgcccttttctaacaacagaatagaaagtttgcgtacaaacgggctggtgtagctaccgacgagtttcatgccgagtcctttgtgcgaggaaaaatatcagtatggctcaatgatccaaataaagataatgcatccagctggtcattcttagcagcactttccgcatcacgctaacatggctgaaatggtcggagtaaaccgccacctgggcgtagatgccgtcgggtaaggcatcgatatcatcgttagggtccagttcaatggttcccagcacaccgtccgtgccgggcacgaccgttaaactttgcaataccccctgcgcctgataagaaccgcctggcacgacaggtaaaatactagtcagtttgccgtgaaacacctgcccaggtagcgcgttaaacaccacttccgcatcatcgccaggtttcagacgtaacaggctgttttgccgaaattgggcgacaatttgccgtttttgctcggggatgaagaccatcaccggacgcagcggcaaggcagctgcgtatgtacctgggcggatcagtacctgagtaacgtagccattgctcggcgcgcgaatgacagtctgctcaaggttatattttgcttcagtaagttgcgctcttaagctcacaatctggctttgctcgccgttaaccatactgtcgagctggctctggatctgcgcctgctccgccacgctgcctttcaccagcgcatcctgcgcgaggaaattttgccgcgcatcgtcgatgtcacgttcgctgaacggattcaccgccgcctggctgcctttcaagtaacgttgataatttttaaacagacggtcgcgctccgcactaacctgggtggtgttggcctgcgcttcagtgagctgcgcacgcagcgtctttatattatgcgtcgccgtcatcaggtcagcctgaagtctgtcaactcgcgcctggtaacgaaccgggtcgagcttaaaaagcacctcgcccttttgaataagctgattattcttgtcagtgacttcagtaacaattcccgtcacctgtggcgtgatagggatcgctatcactgccttttgcgcggtaaaagtgtaagggtggttgtagttcatcaacaaaatcaaaccactcaccagaaacacgcctcccagcgccgccgtcgccagcgtccactgatttaccggaatgcggaagattttaaagaccgcccacgccagcgccacgtaagttaaaacaatcaatagatccataattagatctccgggaacgtggaatagtcagtctttttctcggcggcgagttgatgctccaaccgggaaattcggtcagaaagtgcggcgatttccgggtcagtcgctttctcctggctcgcaacatgactctgcataccccagccacgctccggttgatagagcgtcgcccagatccacagaaacggccagataacatgcagagtaaacaggctcacccagcccgccgtatgaatagcgtcggcatggggatggttgcgctttttggcaatcagataagggatgtcatgtatcgcgatgattccataaaaaatcaccagaaagacgaagatcagcactcccaacgcgaaatagtttagaaacatatctgcctcggattcacgtttatcagtgttgtttttgggctggcagccagaagggagtcaggctgatattttgacaataatccgggttcgcgattctcgccataacaccaaagaataatttttagaggtgatgagttgcttagttacataacgattgtatgacgaaggcataacatgctgtagatcacatcaggtgaacgccgtaagaaaatatcttgtgattcagatcacaaagattcaacaaaccatcaaaacaaaaatgtgacactactcacatttaaatgccatttttagcgaaaatcgccgccttgttgcttttttacacaagcgttttgtgatgaacgtcacgtcaattacctctctaccccctatatttatgtgattgatatcacacaaaaggccgtcgactggacagttaaccgattcagtgccagatttcgcagtatctacaaggtccggctacctctgccgccacattaacaaaaaacctcgggcttccagcctgcgcgacagcaaacataagaaggggtgtttttatgagttccgatattaagatcaaagtgcaaagctttggtcgtttcctcagcaacatggtgatgccaaatatcggcgcgtttatcgcgtggggtatcatcaccgcgttatttattccaacagggtggttaccgaacgagacgctggcgaagctggtcgggccgatgatcacttatctcctgccgctgctgatcggttataccggtggtaagctggtaggcggcgaacgtggcggcgtagtcggtgccatcaccaccatgggcgttatcgtcggcgcagacatgccgatgttcctcggttctatgattgcaggtccgctgggcggctggtgcattaagcacttcgaccgctgggtagacggtaagatcaaatccggttttgagatgctggtgaataacttctccgcaggcatcatcgggatgatcctcgctattctggcattcctcggcattggcccgattgttgaagccctgtccaaaatgctggctgcgggcgttaacttcatggttgtccatgacatgctgccgctggcgtctatctttgttgaaccggcgaaaatcctgttcctcaacaacgccattaaccacggtatcttcagcccgctgggtattcagcagtcccatgaactgggtaaaagtatcttcttcctgattgaagctaacccaggtccaggtatgggcgtgctgctggcgtacatgttctttggtcgtggtagcgctaaacagtctgcgggcggtgcggcaatcatccacttcctggggggtatccacgaaatctacttcccgtatgtgctgatgaatccgcgtctgatcctcgcagtcatcctcggcggtatgactggcgtgttcacgctgactatcctgggcggtggtctggtttctccggcatctccgggttctatccttgctgtactggcgatgacaccaaaaggtgcttacttcgctaacatcgcgggtgtgtgtgcggcgatggctgtctccttcgttgtctctgctattttgctgaaaaccagcaaagtgaaagaagaagatgatattgaagcagcaactcgtcgtatgcaggacatgaaagctgagtctaaaggcgcatctccgctgtctgctggcgatgtgactaacgacctgagccacgtacgtaaaatcatcgttgcctgtgacgccggtatgggttccagtgcgatgggcgcaggcgttctgcgtaagaaaattcaggatgcaggtctgagccagatttctgttactaacagcgcgatcaacaacctgccgccagatgtggacctcgtcatcactcaccgtgacctgaccgaacgcgctatgcgccaggttccgcaggcacagcatattagcctgaccaacttcctcgacagcggcctgtacaccagcctgaccgaacgtctggttgctgcccaacgccacacggcaaacgaagagaaagtaaaagacagcctgaaagacagctttgacgattccagtgctaacctgttcaagctaggcgcggagaacatcttcctcggtcgcaaagcggcaaccaaagaagaagcgattcgttttgctggcgagcagctggtgaaaggcggttacgttgagccggaatacgttcaggcgatgctggatcgtgaaaaactgaccccgacttatctgggtgagtctatcgcggtgccacacggtacggttgaagcgaaagatcgcgtactgaaaacgggcgtcgtgttctgccagtacccggaaggcgtgcgcttcggtgaagaagaagatgacattgcccgtctggtgattggtattgctgcccgtaacaacgagcacattcaggttatcaccagcctgaccaatgcactggatgatgagtccgtcatcgagcgtctggcacacaccaccagcgtggatgaagtgctggaactgctggcaggtcgtaagtaatccaatcccaccctctccacatggagaaggtggggttaattgcctgatgcgctacgcttatcaggcctacaggatgcatcacaatttgttgaatttgcacgttcttgtaggccggataaggcgcttacgccgcatccggcgctgcccctctcctcacggagagggtttgggtgagggaaaagcctcaccccagccctctcgggtaaaaacattgatgaaggttaatactatgaaagcattacattttggcgcaggtaatatcggtcgtggctttatcggtaaactgctggcagacgcgggtatccaactgacgtttgccgatgtcaatcaggtggtacttgatgccctgaatgcccgtcatagctatcaggtacatgtggttggtgaaaccgagcaggtagataccgtttccggcgtcaatgctgtcagcagcattggtgatgatgtcgttgatctgattgctcaggttgatttagtcactaccgccgttggcccggttgtgctggaacgtattgctccggcaatcgccaaagggcaggtgaaacgtaaagaacaaggtaatgaatccccgctgaacatcatcgcctgtgaaaacatggtacgcggtaccacgcagctgaaaggccatgtgatgaacgccctgccggaagacgccaaagcgtgggtagaagaacacgttggctttgtcgattccgccgttgaccgcatcgtaccgcctagcgctagcgcaactaacgatccgctggaagtgacggtagaaaccttcagcgaatggattgtcgataaaacgcagttcaaaggcgcactgccgaacatcccaggcatggagttaaccgacaacctgatggcatttgtcgaacgtaaactcttcaccctgaacacgggtcatgctataaccgcgtacctcggaaaactggccggtcatcagaccattcgtgacgcgattctcgacgagaaaatccgcgcggtggtaaaaggtgcgatggaagaaagtggtgcagtattgatcaagcgctacggctttgacgctgacaagcatgcggcgtacatccagaaaattctcggccgttttgagaacccgtatctgaaagatgatgtagagcgcgtaggccgtcagccactgcgtaaactgagtgctggcgaccgtctgatcaagccactgctcggtacgctggaatatggtctgccacataaaaacctgattgaaggtattgccgctgcaatgcacttccgcagtgaagatgatccgcaggctcaggaactggcagcactgatcgctgacaaaggtccgcaggcggcgctggcacagatttccggtcttgatgccaacagcgaggttgtatccgaggcggtaaccgcttataaagcaatgcaataatggtggaccaggcgcaggacaccctgcgcccgaataacagattgagtgatatgcaggcaacaatggaacaaacccaggcctttgaaaaccgtgtgcttgagcgtctgaatgctggcaaaaccgtgcgaagctttctgatcaccgccgtcgagctcctgaccgaggcggtaaatcttctggtgcttcaggtattccgcaaagacgattacgcggtgaagtatgctgtagaaccgttactcgacggcgatggtccgctgggcgatctttctgtgcgtttaaaactcatttacgggttgggcgtcattaaccgccaggaatacgaagatgcggaactgctgatggcattgcgtgaagagctaaatcacgacggcaacgagtacgcctttaccgacgacgaaatccttggaccctttggtgaactgcactgcgtggcggcgttaccaccgccgccacagtttgaaccagcagactccagtttgtatgcaatgcaaattcagcgctatcaacaggctgtgcgaagtacaatggtccttagtctgactgagctgatttccaaaatcagcttaaaaaaagcctttcaaaagtaagcaacgtctgcttactgcccctctacctgcttcggccgataaagccgacgataatactccagacgttgtagatataacggcacgctttcatcgggtattccggacggaatcgcgttacggggaggaagttttttcagatactcccggaacgcctggctacttgccatgaaatctacggctttatcgataagaagcggaacgttttcacctaatttgcccatgatgatatctccgtattaccccgcgccgggaatgcgcggccgccaattttagtttaggttcccggtaaagatgacattaaggaaaacgtgctgaatcctcaataatcatccgctgctgtttattatcttttttctatagatttcttaattaatcaacgaattgcgcagtttttgagcatgttaatgattacgttacagaactattacaatgtcattagttgtgaacaaagcacctggtcgcgcatactaggggctataaatttatctttatcagaagccatcacatgaaagaagtcgaaaaaaacgaaatcaaacgcctcagcgatcgcctggacgccatccgccaccagcaggccgatcttagcctggttgaagccgcagacaaatatgccgagctggaaaaagagaaagccacgctggaagcagaaattgctcgcctgcgtgaagttcatagccaaaaactgagtaaagaagcacagaagctgatgaagatgccattccagcgcgcaattaccaaaaaagagcaggctgatatgggcaagctgaagaaaagtgttcgcggactggtcgttgtgcacccaatgaccgcactgggccgcgaaatgggcctgcaggagatgactgggtttagtaagaccgcgttttaagaacacagtatctacagggtgattctgcacattcctataggccgagtaaggtgttcacgccgcatccggcaagataaggcgctctggatcaacaacctaagggcaattctctgatgaggattgcccttttctttaccagacatctccccccacaagaattggccctaccaattcttcgcttatctgacctctggttcacaatttcccaattaaaactcacatcaatgttgccaatacataacatttagttaaccattcattgtcattatccctacacaacacaattggcagtgccacttttacacaacgtgtgacaaggagatgagcaacagactcattacacgatgtgcgtggactccaggagacctgcaatgaatctctggcaacaaaactacgatcccgccgggaatatctggctttccagtctgatagcaagccttcccatcctgtttttcttctttgcgctgattaagctcaaactgaaaggatacgtcgccgccagctggacggtggcaatcgcccttgccgtggctttgctgttctataaaatgccggtcgctaacgcgctggccagcgtggtttatggtttcttctacgggttgtggcccatcgcgtggatcattattgcagcggtgttcgtctataagatcagcgtgaaaaccgggcagtttgacatcattcgcagctctattcttagcataacccctgaccagcgtctgcaaatgctgatcgtcggtttctgtttcggcgcgttccttgaaggagccgcaggctttggcgcaccggtagcaattaccgccgcattgctggtcggcctgggttttaaaccgctgtacgccgccgggctgtgcctgattgttaacaccgcgccagtggcatttggtgcgatgggcattccaatcctggttgccggacaggtaacaggtatcgacagctttgagattggtcagatggtggggcggcagctaccgtttatgaccattatcgtgctgttctggatcatggcgattatggacggctggcgcggtatcaaagagacgtggcctgcggtcgtggttgcgggcggcagctttgccatcgctcagtaccttagctctaacttcattgggccggagctgccggacattatctctagcctggtaagtctgctctgcctgacgctgttcctcaaacgctggcagccagtgcgtgtattccgttttggtgatttgggggcgagtcaggttgatatgacgctggcccacaccggttacactgcgggtcaggtgttacgtgcctggacaccgttcctgttcctgacagctaccgtaacactgtggagtatcccgccgtttaaagccctgttcgcaagcggtggcgcgctgtatgagtgggtgatcaatattccggtgccgtacctcgataaactggttgcccgtatgccgccagtggtcagcgaggctacagcctatgccgccgtgtttaagtttgactggttctctgccaccggcaccgccattctgtttgctgcactgctcagcattgtctggctgaagatgaaaccgtctgacgctatcagcaccttcggcagcacgctgaaagaactggctctgcccatctactccatcggtatggtgctggcattcgcctttattagcaactattccggactgagtagtacactggcgctggcactggcgcacaccggtcatgcattcaccttcttcagcccgttcctcggctggctgggggtattcctgaccgggagcgataccagttctaacgccctgttcgccgcgctgcaagccaccgcagcacaacaaattggcgtctctgatctgttgctggttgccgccaataccaccggtggcgtcaccggtaagatgatctccccgcaatctatcgctatcgcctgtgcggcggtaggcctggtgggcaaagagtctgatttgttccgctttactgtcaaacacagcctgatcttcacctgtatagtgggcgtgatcaccacgcttcaggcttatgtcttaacgtggatgattccttaatgattgttttacccagacgcctgagtgacgaggttgccgatcgtgtgcgggcgctgattgatgaaaaaaacctggaagcgggcatgaagttgcccgctgagcgccaactggcgatgcaactcggcgtaagtcgtaatagtctgcgcgaggcgctggcaaaactggtgagtgaaggcgtgctgctcagtcgacgcggcggcgggacgtttattcgctggcgtcatgacacatggagcgagcaaaacatcgtccagccgctaaaaacactgatggccgatgatccggattacagtttcgatattctggaagcccgctacgccattgaagccagcaccgcatggcatgcggcaatgcgcgccacacctggcgacaaagaaaagattcagctttgctttgaagcaacgctaagtgaagacccggatatcgccagtcaagcggacgttcgttttcatctggcgattgccgaagccagtcataacatcgtgctgctgcaaaccatgcgcggtttcttcgatgtcctgcaatccagtgtgaagcatagccgtcagcggatgtatctggtgccaccggtttttagtcaactgaccgaacaacatcaggctgtcattgacgccatttttgccggtgatgctgacggggcgcgtaaagcaatgatggcgcaccttagttttgttcacaccaccatgaaacgattcgatgaagatcaggctcgccacgcacggattacccgcctgcccggtgagcataatgagcatagcagggagaaaaacgcatgattatttccgcagccagcgattatcgcgccgcagcgcaacgcattctgccgccgttcctgttccactatatggatggtggtgcatattctgaatacacgctgcgccgcaacgtggaagatttgagtgaagtggcgctgcgccagcgtattctgaaaaacatgtccgacttaagcctggaaacgacgctgtttaatgagaaattgagcatgccggtggcactggctccggtgggtttgtgtggcatgtatgcgcgtcgtggcgaagttcaggcagccaaagcggcggacgcgcatggtattccgtttactctcagcacggtttccgtttgcccgattgaagaagtcgcgccagccatcaagcgcccaatgtggttccagctttatgtactgcgcgatcgcggctttatgcgtaacgcgctggagcgagcaaaagcagcgggttgtagcacgctggttttcaccgtggatatgccgacaccgggcgcacgctaccgtgatgcgcatagtggtatgagcggcccgaacgcggcaatgcgccgctacttgcaagcggtgacacatccgcaatgggcgtgggatgtgggcctgaacggtcgtccacatgatttaggtaatatcagtgcttatctcggcaaaccgaccggactggaagattacatcggctggctggggaataacttcgatccgtccatcagttggaaagaccttgaatggatccgcgatttctgggatggcccgatggtgatcaaagggatcctcgatccggaagatgcgcgcgatgcagtacgttttggtgctgatggaattgtggtttctaaccacggtggccgccagctggacggtgtactctcttccgcccgtgcactgcctgctattgcagatgcggtgaaaggtgatatagccattctggcggatagcggaattcgtaacgggcttgatgtcgtgcgtatgattgcgctcggtgccgacaccgtactgctgggtcgtgctttcttgtatgcgctggcaacagcgggccaggcgggtgtagctaacctgctaaatctgatcgaaaaagagatgaaagtggcgatgacgctgactggcgcgaaaagcatcagcgaaattacgcaagatagcctggtgcaggggctgggtaaagagttgcctgcggcactggctcccatggcgaaagggaatgcggcataatcgtttgcgccccctcaccctaaccctctccctcagggagaggggaccgttcggcgctgtatgtactccctcactctgaaacgacaccgcactctttttttctccctcgcccctccggggagagggccggggtgaggggaaaaggccgcactgctcaccaattttctgctatcctgcccccgcactaagggggcagtatgctaaacatcgtactttacgaaccagaaattccgccaaatactggcaacatcatccgtctttgcgctaataccggctttcgtctgcatatcatcgaaccgatgggatttgcctgggacgataagcgcctgcgccgcgcggggctggactatcacgagtttaccgccgttacgcgtcatcatgactatcgcgcgttcctcgaagcagaaaatccccagcgcctgttcgccctcaccacgaaaggtacacctgctcacagcgccgtaagctatcaggatggcgattatctgatgttcggcccggaaacacgcggcctgccagcgagcattcttgatgccctgcccgctgaacaaaaaattcgcattccgatggtgccggacagccgcagcatgaatctgtccaatgcggtgagcgtagtggtgtatgaagcctggcggcagttggggtatccgggagcggtattgagagattaattactgtaggccggatagatgattacatcgcatccggcacgatcacaggacattagatcccatccccatactcaaatgtatggttaataccgttgaaatgctggtccatatccatacttggcttatcgctgtctggtttaccgacaatacgagccggaacgccagcggcggtggtatgcggcggcaccggttgcagcaccacggaacctgcgccaatcttcgcgccgcgcccaacttcaatattgccgaggattttcgcgcccgcgccaatcatcacaccttcacgaattttcgggtgacggtcaccaccagatttacccgtaccgccaagcgtcacagattgcagaatgcttacgtcgttttcaatcaccgccgtttcaccaacgacgatgcctgtcgcgtggtcaagcatgataccgcgaccaatttttgctgccgggtgaatatcgacctggaacgtcacagaaacctggttttgcagaaagattgccagtgcgcgacgcccctgattccacaaccagtgaccgatgcgataggcctgcaaggcatgaaaacccttcaggtataacaacggggtactgtatttatcgactgccgggtcgcgggtacgcaccgcctgaatatcacaggccgcagaggcgatcatttccgggtcagcggcgtaggcttcttccaccacttcacggatagcaatagcaggcataattgggctactcagcttgttcgccagcatgtagctcagtgcactgccaaggttttcgtgcttgagtagcgtcgcgtggtaaaaactggccagcattggctcacagtccgccagcgttctggcttcggctttaatattgttccagacaatttccagttcttcacagctcattgcttactccacacgatgagataatgaccggcccgttctgcgcgggccgggtcatagcggtaacaaaggttccctggggttagtggctgctgcgctcgtccttgcgtgcacgacctagtaaagtcaatgctgcctcgcgcgcgttttttccgcaatataatacttgataaatttcctcggttattggcatttcaacgccgaagcgatgcgccagttcgcggacttctttcgtattgcggtagccttccaccacctgaccaatcttctcctgcgcgctttgtacatccatgccctgaccgagcatcatgccaaaacggcggttacggctctggttgtcggtacaggtaagcaccagatcgccaagccccgccatgcccataaaggtggcagggtcggcacccagcgccgcaccaagacggctcatttcagccagcccacgggtgatcagcgccgtacgcgcattcgcaccaaaaccgataccgtcggacatccccgcaccaatggcaataacgtttttcaccgcgccgccaagctgcacgccaatgaaatccggattgctgtaaacgcggaaacttttgccgcagtgcagcagctgctggagatcatcggcaaaggtctgatcggtgctggccaggctaatagctgtcggtaaacctgccgccagttctttcgcaaacgttgggccagagataaccgccagcggaatttgatcgcctaaggcctcacgcgccacgtcctgtaacagacgtccggtttccgcttccagccctttggtcgcccacaccagacgcgcatcaggacgcatcagtggtttaatctggcgcagcacttcaccaaagacatggctgggtacgacgacgagaatattacggctggctgccagcgcagtggcgagatcgctttcaagatggagcgtatcgggaaaaggcacatcggggagaaacgcggcgttacagcggtcgcgttcaagcgttgcgatatgttcagggtcatggccccagaggacaacctcgtggccatttcttgccagggtgatggcaagagcggtgccgtagctgccggcaccgatcacagtcatactagcattacgttggttcatcaggcatcctgatgttcttcagtaccttcgccagcctgctgctgcaaatagttcatgaacagcgcatcgaagttaaccggcgcaaggttcagttgcgggaatgtaccgcgggataccatgctggtgatgcactcacgagcatacgggaacagaatgttcgggcagtatgctcccaggcaatgcgccatctgggtgccttcgatacccgcgatggagaaaataccgccctgctgaacttcacacaggaacgcggtttcttcgcccaaagaggccgttacggtaacacgcagtaccacttcgtatacgtcatctgccagttgggaagatgccgtatccagatcaagtttaacttctggttgccaatctttctggaaaacgtgcggcgcgttcggcgcttcgaaagagatatccttggtataaatacgttggatctggaaagtcatttcagtgttgttttgttcactcatgtgtagaaaacccttaagtgttgtccttaaatactgcgcaatgtaatgccaacgttcacacgttatttcagcaggggatccagtccaccacgtgcatccaatgcatacaagtcatcacagccgccaatgtgctgtgcgtcaataaaaatctggggaaccgtggtgcgaccgctgcgtttgatcatctcttcacgcttggcggcgttgccatcgatcggcagctcctggaaactcacgcccttgctgctcagcagtgcttttgcacgatggcaatacgggcaggtttctttggtatagatttcaacattggccataaattagctcctgtttttttaccctgaaatttcatgttgcagggcggcagcaaaatggagtgtccccagaagcttataacaataagtcgctgggggcctaattgcagctaacggcctgcatcatgaaagacgacaggtaaattatttgccgcgcaccaaaggcaagttttcgccagcccagccagcgacgccttctttcagcacgaatacttgcgcaaaaccagctttcgtcagtgcgtttgcaggctcctggcactgcatgccagaaccgtctaccacgataaccggtttgtctttgtgcttctcaagctcaccaacattgttggctttgatttcgctcggcaacagattaatagaacctgcgatatggcctttacggaagtcatcacgctgacgtaaatccacaaccacagcgtcttctttgttgatcagacgcgtagcttcaccacgagtaatcaccttcactttgctggtcaggctcttaaacgtagtcacaagaaccgccaccagtaacgcgatccaggcgatactcagtatgggatgacggccaacaaattgcataatttcttgcatggggggtaacaactcccgacgtagtgattaaaaaaaccaggaaaggagtatacctgcgcggtgcggcaaatacagccagcgcgttaactggaatgcaattttgcggggcgcgacgaaaaaaaagcgtaaatctggcatcggcttgccgcgagcggtcgtatattttgatcttcagaggctattttatcgattcagctgtagtaaaattacgcaaattttgactcttgagtatgaggttgtcgcaatgttggtttctaaaaaacctatggtactggtgattctggatggctatggctatcgcgaagaacagcaggataacgccatttttagtgctaaaaccccggtaatggatgcactgtgggccaatcgtccgcataccctaatcgacgcttccggtctggaagtcggtctgcctgaccgtcagatgggtaactccgaagtaggccacgttaacctgggtgccggccgcatcgtgtatcaggacctgactcgtctggacgttgaaatcaaagatcgcgctttctttgctaatccggtgctgactggcgcggtagataaagcgaaaaacgcaggcaaagcggtacacattatgggtctgctctccgcaggcggcgtacacagccacgaagatcacatcatggcgatggtagaactggcagctgaacgcggcgcagaaaaaatctacctgcacgcattccttgacggtcgcgacactccgccgcgcagtgctgaatccagcctgaaaaaattcgaagaaaaatttgccgcgctgggcaaaggccgcgtagcgtccatcattggtcgttactacgcgatggaccgcgataaccgttgggatcgcgtagaaaaagcttatgacctgctgactctggcgcagggcgagttccaggccgataccgccgttgctggtttgcaggctgcttatgctcgcgacgaaaatgatgaattcgtgaaagcgaccgttatccgtgctgaaggtcagccagacgcggcaatggaagacggcgatgcactgattttcatgaacttccgtgctgaccgcgcgcgtgaaatcactcgtgctttcgtgaacgctgatttcgatggcttcgcgcgtaagaaagtggttaacgtcgatttcgtgatgctgaccgaatacgccgctgacatcaaaactgcggttgcttacccacccgcttccctggttaacaccttcggcgagtggatggcgaaaaacgacaaaactcagttgcgtatttccgaaaccgaaaaatatgcccacgttactttcttcttcaacggtggcgtagaagagagcttcaaaggcgaagatcgcattctgatcaacagtccgaaagtggctacctacgatctgcaaccggaaatgagctccgcagagctgaccgaaaaactggttgcggccatcaagagcggcaaatacgacaccatcatctgtaactatccgaacggcgacatggtaggtcacaccggggtgatggaagcggcggttaaagcggttgaagcgctggatcactgcgtggaagaagtcgcgaaagcggttgagtccgtgggtggacaactgctgatcaccgctgaccacggtaacgctgagcagatgcgcgatccggcaacgggtcaggcacacacggcacacaccaacctgccagttccgctgatttacgttggtgataagaacgtgaaagcggttgaaggcggcaaactttctgacatcgcgccgaccatgttgagcctgatgggtatggaaatcccgcaagagatgactggtaagccgctgttcatcgtggaataatccctccccatgaggggaaaggcgattaataccatgacacgggccgtgaaaccgcgcaggtttgcaatcaggcccatcatctacgccagcgttcttagcgctggcgtattgttgtgcgccttttccgcccacgcggatgagcgtgaccaactcaaatctattcaggctgacatcgccgcaaaagagcgcgcggtacgccaaaagcaacaacaacgcgcaagcctgctcgcacaattgaaaaagcaggaagaagcgatctctgaagccacccgtaagctgcgcgaaacgcaaaacacgctcaatcaactcaataaacagattgatgagatgaacgcgagcattgccaaactggagcagcaaaaagccgcccaggagcgcagcctcgccgcacaactggatgccgcattccgtcagggcgagcataccggtattcagctgattctcagcggtgaagaaagccagcgtggacagcgtttacaggcttatttcggctatctcaaccaggcgcgacaagaaaccattgcccagttgaagcaaacgcgtgaagaagtcgccatgcagcgtgctgaactggaagagaaacagagcgagcaacaaacgctgttatatgagcagcgcgcccaacaggcgaaactgactcaggcgctgaacgagcgtaaaaagacgctggcagggctggagtcttccatccagcaaggtcagcaacagttgagcgagctgcgcgccaacgaatcccgtctgcgtaacagcattgcccgtgcggaagccgcggcgaaagcgcgtgcagaacgagaagcacgtgaggcccaggcggttcgcgaccgccagaaagaagcgacgcgcaaaggcaccacctacaaaccgaccgaaagcgaaaaaagcctgatgtcccgtaccggtggtctgggcgcgccgcgtggtcaggcattctggccggttcgcgggccgacgctgcatcgctatggcgaacagctacagggtgaattacgctggaaaggtatggttatcggtgcttctgaaggtactgaagttaaagcgattgccgacggtcgggtgattctggctgactggctgcaaggctacggtctggtggtggtggttgagcatggtaaaggcgacatgagtctttacggctataatcagagcgcactggtgagcgttggtagccaggttcgcgcgggccagccgattgcactggtgggcagcagtggcggtcagggtcggcctagtctctatttcgaaattcgccgccagggtcaggcggtcaatccacagccgtggttgggaagataagttttgtttccatttcgtcgtaacgttcttgcatttgccgctctgttggcgctctcctcccccgtacttgctggcaaacttgccatcgtcattgatgattttgggtatcgcccgcacaacgaaaaccaggtgctggcgatgccttccgctatctccgtcgctgtattacccgatagtccgcacgccagagagatggcgaccaaagcgcataacagcgggcacgaagtgttgattcatctcccgatggcaccgttgagtaaacagccgctggagaaaaatacgctacgcccggagatgagcagcgacgaaattgagcgcattattcgtagtgcggtcaataacgtgccctatgccgtggggatcaacaaccacatgggcagcaagatgacctctaacctgtttggtatgcagaaagtgatgcaggcgctggagcgttacaatctttacttcctcgacagcgtaaccatcggtaatacccaggcgatgcgcgccgcgcaaggcactggcgtgaaggtgatcaaacggaaggtattcctcgacgatagccaaaatgaagcggacatccgtgtgcaatttaatcgcgcaattgacctggcgcgtcgcaacggtagcaccattgccattgggcatcctcaccctgcaacggtacgcgtgttgcaacagatggtttataacctgccgccagacattacgctggtgaaagccagcagcttgctgaatgaaccgcaggttgatacttctacaccgccgaaaaacgctgtgcctgatgcaccgcgtaatccgttccgtggcgtgaagctgtgcaaaccgaagaaaccgatagaacctgtttatgctaatcgcttctttgaagtattaagcgaaagcatcagccagagcacgctgatcgtttacttccagcatcagtggcaaggctggggcaaacagcccgaagcggcgaagtttaacgctagcgcaaattaattagcgcaaattaaaggcgctacgcgtaatgcgatggtggctccgcgttttgtcgcgccattgccataagcggaaagaccacagtaacgcctggtaaccgaccttcacgctgcgcacattggtaatcaggcgcttatacataccggaagtaaatatctcggcaatcatccgttggcgggtaagaatatccggctctttgcgcaccgcatggcaaacacgcaatgcctcgtaagttatttgctgatgaaattccggataaatcataattttgtcggcataatttcgatttaatttctccagcaggcgggtaatcttaatatagtgacgttgataattaaggtttttattcccttgtctatgcaaccgactcacactcgtattatgcagataatatttatataaactttgctcggtatatcgcgcacgcagcgcgttaaacatgaattctgttgtccagacaatatcctgatgatgtaatccggcaataaatttaatgttatttttaacaataacatcacggcgataaacccccatccagacaacgtgagtccaacggcggctagaaagccccatccgcagccagtccgggccggttaatacgccggtactgcgaaggcgatcggtggggatggattgccaggtttctcccgtttcacgaaaacaccagtcagcgttgcactgcgccacgtcgaggtcgtcctctaacgccatggtcatcagcgtttcgtacatggtgggatagacttcatcgtcagcatcgacaaaagcgacatatttgcccgttgccacttcaatcccacgattacgcgccacgcttgcgccagcattcgcctgatgcaacaaacgaacgtgcggatagttttctgcgtaatactttgctatttcaacagaattatccgtactaccatcgttaataataatgatttccagagcagtccaggtttgcgtaattaaagattccatacaagtgcggaaatcatcgcccgcattatataacggaataataacactaagtttattggtgctgttcatcataaattaccgacgacctctgaagttatcctgacgttttacaggctttgtattaagaaactattaagcctgtgagatattatttttacaggtgagagagtcacttcagggtagagagataatgagagcagctatataagagatcagcacaattacgaactctttattacactgacaggattttacatatttaacagattatcctcagataaaagggctggaataccagcccttgttcgtgttaatcccagctcagaataactttcccggactggccgctacgcatagcgtcaaagcccttctggaaatcatcgatagagaaacgatgggtaatgatcgggctaagatcgaggccagactgaatcagcgccgccatcttgtaccaggtttcaaacatctcacgaccgtaaatacctttaatgaacaagcctttaaagatcactttggtccagtcgatagacatatcagacggcggaatacccagcatcgcaatacggccgccgtgattcatggtgtcaagcatggtacgaaacgctggcggcgcaccggacatttccagaccgacatcaaaaccttcggtcatgcctaactccgccatcacgtcattgagattttctttggcgacgttaaccgcacgggtgatacccattttacgcgccagctcaaggcggtattcgttaacatcagtgatcaccacattgcgtgcaccaacgtgtttcgccaccgccgctgccataataccaatcgggcctgcaccagaaaccagcacatcttcgcccaccagatcaaagctcagcgcggtatgcacggcgttaccgaagggatcaaaaattgcggctaagtcatcggaaatattgtcggggattttgaaggcgttgaatgccgggatcaccagatattcggcaaagcagcccgggcgattaacaccaacgcctatcgtgttgcggcacaaatgggtacgaccaccacgacagttgcggcaatgaccacaggtgatatggccttcgccagaaacgcgatcgccgatcttgaagcctttcacttcctgaccaatacctaccacttcaccgacatattcatggcccacgaccatcggcaccgggatggttttttggctccactcatcccagttatagatgtgaacgtcagtcccgcagatggctgttttacggattttaatcagcagatcgttatgcccgagttccggtacaggaacgtcggtcatccagatgccctcttccgctttcagtttggataacgctttcatctcacatcctcaggcgataacgcccagttgtttaccaatacgcgtaaatgcttctactgcacgcgtaatttgctcaggggtatgcgccgcagacatctgggtacgaatacgcgcctgacctttcggaacgaccggatagaagaaaccggtaacgtaaatgccctctttttgcagctcacgggcaaatttctgcgccactaccgcatcaccaagcatgaccggaataatggcgtgatcggctcccgccagggtaaagcccgccgcgctcatttgctcacggaactgacgcgcgttcgcccacagacggtcacgcagttcgctgcccgcttcgaccatctccagtactttgatggacgcggcaacaatggccggtgccaggctgttggagaacaggtacggacgagaacgctggcgcagccactcaaccacttctttgcgcgccgcggtataaccaccagaagccccgcccagcgctttaccaagcgtaccggtgataatatcgacccggcccatcacatcgcagtattcatgggaaccacgaccattttcaccgacaaaaccgaccgcgtgggagtcgtctaccatcaccagggcatcatatttatctgccagatcgcaaacgcccttcaggttggcaatcacgccgtccatactgaacacaccatcggtggcgatcagcacatgacgcgcaccggcttcacgcgcttctttcagacgtgcttccagctcctgcatatcgttgttggcatagcgatagcgtttagctttgcacagacgcacaccatcaataatagacgcgtggttcagtgcgtcggagataatggcgtcttccgcacccagaagcgtttcaaacaggccaccgttagcatcaaagcaggaagagtagagaatcgcatcttccatccccaggaaggccgccagtttttgttcaagctctttatggctgtcctgagtgccgcaaataaaacgcacgctagccatgccgaaaccgtgagaatccattcccgcctttgccgccgcaatcagatcaggatgattcgccagcccgagatagttgttggcacaaaagttaatgacgtggcttccatcagccacagtgatatctgcttgctgcgcagacgtaataatgcgctcttctttaaacaacccttccgcccgtgcggtttccagatcgttggttaactgctgataaaattctccacgcattgcgattctccagacagggcaaattccagcacatattacccaaacttataggtcgcgacgagataacgcgttaacacttctgcaaaattcaggataaataacgtgtaacttgatgtctctcaacacctacagatagtagaaaaactgtacagttttggctgggcataatgatgattgattttactgcattgatataaaaagaaaaaatgatgccaaagcatcatttttcctatctcagttggtatcaaaacgctacccactaatggagggaaacttattttctactaaggaaaattctcagcgcctgcatttttgcccctaaagtgttactcctgaagcagcgaaacaaatcgaaccattttcctctccccagatagtttaggttgaagagatcggggcgtttgtaatagcacatgacaaaaatgccctggtcatcgtccacaatgttattatttagtgttattttttgactttccagaactaatttatagaattctttccatttatgctgactaccaacaattgcgcccccaataatatatacatgattgccaatcatgaaatcaaaaacctgttgttgagatgtgacagtaagccctttttttatagtgaaaagatgcatcttactttcatcaaatgggaaatcccaaattttcaatcctcgagttacatttggcttatggcaatagccaaaatctatccacgcaacaagaggcgttttcactaagcccatgttgatagctttatttacaaaataggccttaaggttacataccaaaacatactctggactccagtactctgggttttttaattgtcgaggctcaagtctatttgtaaagctctcatctttttgaattttttcgatacgacttctgatatatctaaatttcttttttatatcgataacgataaccgttgttggttttccgttgcgaatcgcttcaacccttggtttcaaatcgggagaagtgaaaataatcatctcattttcaagtgcggccagacgctcaaagtaactaaaataaacatcaacactacgagctagtttttcacggaaccctttattagcagtccaatcccctctaccaatgtcaaaatatgcagtgataattgtggtggaacttttcattactaataagaccattaatataaaaaaagaattatatcataaatattaatagaatgtatactgtatattatccattcaaatgcttccgttatttatcatacatcggaatattgatactaaagcactattcacatgcaaaaccaacatccgccatgaaggactagctaaaacccaaactagtttgttgcaattagcatccttgcacctctatgtaaagggctgaagggattcggatgtgatggtatgattacagacattcgtgtctgagattgtctctgactccataattcgaaggttacagttatgatcatcgttaccggcggcgcgggctttatcggcagcaacatcgttaaagccctgaatgataaaggcatcaccgatattctggtggtggacaacctgaaagacggcaccaagtttgtgaacctggtggatctgaatatcgcagactatatggataaggaagacttcctgatccagattatggctggcgaagagttcggcgatgtcgaagcgattttccacgaaggcgcgtgctcttccaccaccgagtgggacggcaagtatatgatggataacaactatcaatactccaaggagctgctgcactactgcctggagcgtgaaatcccgttcctgtacgcttcttccgcagccacctacggcggacgcacctccgactttattgaatcccgcgagtacgaaaaaccgttgaacgtctacggttacagtaaattcctgtttgatgaatatgttcgtcaaatcctgcctgaagcgaacagccagattgttggcttccgttatttcaacgtttatggaccgcgtgaaggccataaaggcagcatggcgagcgtcgctttccatctcaacacccagcttaacaacggtgaaagtccgaagctgtttgaaggtagcgagaacttcaaacgcgacttcgtctatgtgggcgacgtggctgatgtgaatctgtggttcctggaaaatggcgtttccggcatcttcaatctcggtactggtcgtgcggaatccttccaggcggtagctgatgctacgctggcttatcacaagaaaggccagatcgaatacattccgttcccggataaactgaaaggccgctatcaggcgttcactcaggcagatctgacaaatctgcgcgcggcgggttacgacaaaccgttcaaaaccgttgctgaaggtgtaacggaatacatggcctggctgaatcgcgacgcataagagctctgcatgaaaatactggtgatcggcccgtcttgggttggcgacatgatgatgagccaaagtctctatcgcacgctccaggcgcgctatccccaggcgataatcgatgtgatggcaccggcatggtgccgtccattattaagccggatgccggaagttaacgaagctattcctatgcctctcggtcacggagcgctggaaatcggcgaacgccgcaaactgggtcatagcctgcgtgaaaagcgctacgaccgcgcctacgtcttacccaactccttcaaatctgcattagtgcctttcttcgcgggtattcctcatcgcaccggctggcgcggcgagatgcgctacggtttactcaacgatgtacgcgtgctcgataaagaagcctggccgctaatggtggaacgctatatagcgctggcctatgacaaaggcattatgcgcacagcacaagatctgccgcagccattgttatggccgcagttgcaggtgagcgaaggtgaaaaaagttatacctgtaatcaatttagccttagtagtgaacgtccgatgattggtttttgcccgggtgcggagtttggtccggcaaaacgctggccacactaccactatgcggagctggcaaagcagctgattgatgaaggttatcaggtggttctgtttggcagcgcgaaagatcatgaagcgggcaatgagattcttgccgctttgaataccgagcagcaggcatggtgtcggaacctggcgggggaaacacagcttgatcaagcggttatcctgattgcagcctgtaaagccattgtcactaacgattctggcctgatgcatgttgcggcggcgctcaatcgtccgctggttgccctgtatggtccgagtagcccggacttcacaccgccgctatcccataaagcgcgcgtgatccgtttgattaccggctatcacaaagtgcgtaaaggtgacgctgcggagggttatcaccagagcttaatcgacattactccccagcgcgtactggaagaactcaacgcgctattgttacaagaggaagcctgacggatgcgggttttgatcgttaaaacaagcagcatgggcgatgttctccatacgttgcccgcactcactgatgcccagcaggcaatcccagggattaagtttgactgggtggtggaagaagggttcgcacagattccttcctggcacgctgccgttgagcgagttattcctgtggcaatacgtcgctggcgtaaagcctggttcagcgcccccataaaagcggaacgcaaagcgtttcgtgaagcgctacaagcagagaactatgacgcagttatcgacgctcaggggctggtaaaaagcgcggcgctggtgacgcgtctggcgcatggcgtaaagcatggcatggactggcaaaccgctcgcgaacctttagccagcctgttttacaatcgtaagcatcatattgcaaaacagcagcacgccgtagaacgcacccgcgaactgtttgccaaaagtttgggctatagcaaaccgcaaacccagggcgattatgctatcgcacagcattttctgacgaacctgcctacagatgctggcgaatatgccgtatttcttcatgcgacgacccgtgatgataaacactggccggaagaacactggcgagaattgattggtttactggctgatagtggaatacggattaaacttccgtggggcgcgccgcatgaggaagaacgggcgaaacgactggcggaaggatttgcttatgttgaagtattgccgaagatgagtctggaaggcgttgcccgcgtgctggccggggctaaatttgtagtgagcgtggatacggggttaagccatttaacggcggcactggatagacccaatatcacggtttatggaccaaccgatccgggattaattggtgggtatgggaagaatcagatggtatgtagggctccaagagaaaatttaattaacctcaacagtcaagcagttttggaaaagttaagtagtttataaaggtaaaacatgctaacatcctttaaacttcatagtttgaaaccttacactctgaaaagtagtatgattttagagataataacttatatattatgtttttttagtatgataattgcattcgtcgataatactttcagcataaaaatatataatatcactgctatagtttgcttattgagtctaattttacgtggcagacaagaaaattataatataaaaaaccttattcttcccctttctatatttttaataggcttgcttgatttaatttggtattctgcgtttaaagtagataatagcccatttcgtgctacttaccatagttatttaaatactgccaaaatatttatatttggttcttttattgttttcttgacactaactagccagctaaaaagtaaaaaagagagtgtattatacactttgtattctctgagttttctaattgctggatatgcaatgtatattaatagcattcatgaaaatgaccgcatttcttttggtgtaggaacggcaacaggagcagcatatagtacaatgctaatagggatagttagtggcgttgcgattctttatactaagaaaaatcatccttttttatttttattaaatagttgcgcggtactttatgttctggcgctaacacaaaccagagcaaccctactcctgttccctataatttgtgttgctgcattaatagcttattataataaaagtcccaagaaattcacttcctctattgttctactaattgctatattagctagcattgttattatatttaataaaccaatacagaatcgctataatgaagcattaaatgacttaaacagttataccaatgctaatagtgttacttccctaggtgcaagactggcaatgtacgaaattggtttaaatatattcataaagagtccttttagttttagaagtgcagagagtcgcgctgaaagtatgaatttgttagttgcagaacacaataggctaagaggggcattggagttttctaacgtacatctacataatgagataattgaagcagggagtctgaaaggtctgatgggaattttttccacacttttcctctattttagtctattttatatagcatataaaaaacgagctttgggtttgttgatattaacgcttggcattgtggggattggactcagtgatgtgatcatatgggcacgcagcattccaattatcattatatccgctatagtcctcttactcgtcattaataatcgtaacaatacaattaattaagaataaacaagtttaagaagtgagttaaaactcacttcttatctatacaacttaatctctttacactattagttaaagtttcagtatcgatatcttttaccgtatatgttggggatactatttgtatagatttatgatgattcggggaccaaattaaatggctgggatattccggagtacgactattagggtaaaatgcaagcgttggtttatgataagccgcagcgatatgaacaagagctgtatcaacagaaatgacaaaatcactatacttggtcaacgcaacggtataaataaactcatcaaatggtagtgtttcgatttcaagtattggtattgtcaataaatcttgcggtaacccggtaaatataatccgataattttcaaagtgtgttttcacttcttgatatataacttttatttgctcaaacgtaagacggcatattttttttgcacctaatggattaataatgactattcttgtatctccaataaattcttttattttatcttcaacatctactggtaaatgcaagtcgtagttggtggaaaatttaccctcaccataaatatgcttcagtatttctattgctcgtgtactcatatgttcttttaaacattcatcgtggggatggtaaaaactatagtaacgcttataccaatgatcaaaacccagaatgtaagaatcttttaaactacttaatattaagctatgcttaaaactgggcatagtttcaaaggggtctaatacaatatcgaactgtaaatcccgcagatgcttacatagagtaagcatttcaagaaaaccggtactttctttaatacagaactcaaatatatttttattattagagagaaattccccaccctttctatttgtgagaagagttattttaacccctttactataaagttcacgataaatgctacttaatacaattagatcaccaagtttattattatcatgaataataaggcaacttttaacttgtgctggatctgtaatttgattatttattttattacgaaataaaaaagaaaggaaattaatcttgattttgtttatataaaatcttttctttttgtgaaaagttcctaagcgcatttttataccatattattttagtttcaggatgattaattagcataagaatcggtactagttctatattgcattttttttcttgtcatatctttactttcttctgcactgatgtcttgaagtttaataaatggaattacatcgtaagaaatagctgtatcatcacttaaattataaatattaatatcttttacattatcatgcataaaacgaaaaaatggcaatattttgaataaatccctacttaattcgctgggcatgggatttttattctcatcatagaaacgagaacagctacccgttaaatcaagaccagaacaaataatccgcgcatacttaagactatatgcgatttgaattgcagcaaaggcaatagtatggcaactgcaataaccaagactaatgtccttgcaaaatccaaccagacgaccttttttagacaacggtacagagatcagcagttctttgtgaatctgtctcaaaatattaaatttaatcttctttataaaaccacctttttcccgacggtaaaaggaccgtaatacgaggcagttctggaggatataaagtttatcttctttggaagcgtgttcataaacgtcaacgtttactatggtataacgacttctctggctaaatttataaaaatcatcacgacgctgatgtaaaaatcggacatctgtaagtacatatataaaaggaacgatattattacttaacagatattgcgcagaaccattgacagcaataatatcctttgttcgtaatacactcaaaggtgttttttggcttgtagggccgctaagaaaaataataacatcatcagatattttattttcaatcaggttttcaacatcttttttgtcaatgtatctaatattcttcatgataaacctgtgaaataaataactccgcttaaaactgtcctggtgaagacatgtaattgtgggattttttttagcgcgctggtttccctttcaaacgccgcataaaattgcgcatttttttacgatatactaaaagataatagcctagatctctaatctcatttttaataccgtaatgacgctctaagtcaatacgatctttcgctttacgctgcgcactagcacgctttccggagagatcgataattcgaacctcaccattttttataatgaagttaccacgatgggggtcgccagaaaccatgccatgttgatgtaaggcattaatactttgctgaattttattttttagcgcatcatcaatatcgggcatatcacacaactctatgccatcaatatactcgatgatcatgatataagtatggacaaaacgtaaggttttccgttcagccaataaataaaagtcattgagtgtatttaacccttcatttcgtactttttgggtttgctcaaaaaggcgttcgtaataatcaccttttaacagagacttaaagaaacgttcgttacgcttaactttcggagaaaaaaccttaagaatcaatttaccgtaatcggtatcaataagcataacttttgtatcatcaatagaacgaaaaaccttgatgatatttatattataagacaagaagtcatttaatacattgaggtacttactattgttttcatcggtaaaaacaaccaagtctttgatcttgctcttctgaatcataataaaccagttaaatgttatttacggtaatattttcggcaaagataacagactcctgctataattcctgagatataatgatgttgcactaaaagatgtttatatcttttttaaattcaataattgatttcgcatctcgtggagagtcatctttccagggggaattttctaaagctattttatagtattttaccgatggataaattgcccatttgtgccacggtttagttgcacctgtataatgaataagaagagtactttctgtaatcagctttttatagttttgatgtgttttgtcttttaattcacttttaattgtataaattgtattgtactcacgaggcaaaaataatgtcatccctttcagtaagacattcataacatcctgatcagggtatttataaacattatctttactcataagaatagacaacgctttttctgttagttttgcgtcagcccattttcttaagtctaaataaacgacaccggaattaaagtactgcccaagtaattcaggatcagacaacctggataccgccttttcttgcattggctcaacatctttaacaacagcagcaaccgctccatttaaacccagatgtaatagttggctaatatcgcctttacaaacaacatctgcatcaagataaagcaaacgatcaagcgttaaacccaataattgaaatgcaaataaacggaagtacattgctcttgaccagacctgtgtacaaggcaagcactggagcttatcagtgttaattctatataacgtgattcttaattggttttgctctgcaagctttgcaattttttgaaaaaaaccatcattataaacatcagcaataatataaaaatcaagattaatatgtcgattatttaggacaattgatgtgatggaaacacctacaccatcaagataattagcatcgacaccataggcaacatttaaacattcagaagtatttatattagctagccgaaaatcccaggctttaactttatctatctctatggcaggaaatgagtccacaatgctacccttatatcattactttatagtttcccagttttaatgctttatcttttcaataaaataaaaaagatagttgctaaatccttttagatatctatgctttttaagcatatgttttgcgctatatcttaattgattgctattgttcggtttcagcaacgccgtattcttccatgggctagcattttttgcctccataaaggcttgacttacaggataatcccaggcccaatcatgccagggcttggttggcccgatataatggataaaaatagtatcgttggttactgggtttataaagctttctttgagttgataatttaagctgaactgggtgttatatttaatatcagcgaaaataagtttatccgccagcaacatatttaacacatcctgatcaggatgtgttatttttttgattatttctggctcatttagcattgcaatagctcgtgcagaaacctgctgagccgcccattgggcagtattaatcaataaaaaaccggagttaaagtaacctttagcaattcccgcaacacctaagctatgggcgcgtttttcccaccagtcagcttgcccttctgtaacaaccattgcgactttatcgtcaggaaaactgaaattaattagtggctcaatagtcccctgacaaatgatatctgcatccagataaaggactttaggcgccttattaataaagtaatctgcaataacaaaacgaaaatatattgcatgagtccaattcttagtgctaggcaaactgcgcagtcgatcaccattaatcagatatattttaattctggttttatactgcaacgccagggcatcaaaatacttacgatcatcatcaccaaaataatcagtaaaaatatggaaacacaatcgacttccttcattatattttaatatactagcaatgctaattccgcaaccaaatagaaagtttttgtcagttccataagcgatgtccagacaaagattttctgtttctactttatgatcataatcaataacactattaagaaactcagtttcctggaaaaacacctgctgcattatttcctccgggaaatagcagaaataattaccttatgtaatctatcgtaatacttgctttggtaaaattcatcgatgctcgcaggaattttttcatgttcgatatgaatttcacctgctatatatttatttagaagagttacaaaaccagcaatatctcccggttgatacagatggccattgacatcaggttgaataatgtcagcaggcccggagacacaatcggcactgatacaaggaatcccccagctcaaggcttcaagtagggtcattgggaaaccttcaaaagaactcgtgagcaataacgcactcactttttcaatatcttgctggaccaattcccagggatattgttgccaaccataccagacaattcgatcatcaatatttaattctctaccataagcctggcatttttcgaaatcggagccatcacccaatacatggagtttccagttacctttcgcttgacttaagccatcaagcaggtctttaactcttttctggccttcaaatttcatacgcccaacataaataaacgttgccgtttcaccttcctcgggcgcgggaatgacactgtctttagtttcgacgggattaaaaataacatttatcgtgctttctgctacacctcgattaatcatttgctgtttaatgccagagctgattgctaaatgatagtcggcacaggtgatatattcagcatgttttttgtgatctaaagaaaaatgtggccaactaaatactggcatatcaattccactttttttacgtgcttttgcggcaaacaggcaggagatcacatcaatacaaataacgatatctggttggtactcctgaagccatttacttagagcatgaatatgtttcgcccgacgcaaaaaacctaaacgaatattggaaaaactacaactgtatttaataccttccagccatcccttatccattttgtcattacgacaaaagaaaaacatttcactttggatatgttgttgcctgaaggtagtaataacatcacggatgacagtttccatgccgccaaatccagaaacagcttcgccgataaacgctattttcatagaaactctcattaattgagtaaaactcactgttttaacggttttatttgtctataaaatcagaaacaatcgtactcatcattttatctggactgaatttatataaactatcataatccattggtttaacagaactgttaataaaatactctaacttatcccaatcatcatgacctattataaaaaagcgagattcactatagatttcactaccaaatacatttatattattagtaattaattttttattgaaaaatagtgcctcaagtatacgaagagtccagccagattggttttctttggttatatcaacaattatattagcatttaatgttcttctaatattctcttcataagatatttgtttttcaatcaaatacttactagtcgtagaacttgtcttatctttgacaacattaaaatctagcttacatcctagtgttgttaatctctcggctaactcattaattatttgaagacgccctttatcacgaccaaggaaaaaacatattggctggctgttatttttgtcagataaactataatttctaatttcatccattcctataggaaaaaattgttctattgccttgatcttttcattccctataaatctatgctcaaaatcatatataatatcgaaataattcgcgttatcaagaataaaatcttcgccaacagtatttcttagaagcaaaactttatgacagttaatattttttaatatttgtttattgatacctttattaacaacactgtcattaatgataattatgtcatcttttttaatatcattgaggtaatgcttgatgaataatcgccccagccatgcattatccatccctattttacttatttttttattaatccagttatatttttttggtgttgttatattttttatcttgtacttttttttcaggtactgaatcatttttaattcataatctgcaacccaatttataaaataaatagtcataataaagttagttccagtacatactaataaatatttttataatcctttgcgttgtgttcgctctttaatacgctcggccttaacgcttgccatgttcaataaattctgttcaagagacaatattttgcgtaaaggcatcccaaaataaaccttcataaatcgccagatatctctttgcgtcaggccaatattcatactactgaaatataaaccaatcaggtctttatcgcgccagcggcgcggtacttttgcacgtatctgtgcccgatgcagatcgataacactaatttttaattcatcttcccggccagtaaatggcaaatgaagcaaaaagtggcaaatgtaacagtcgcggtgatttatccctgcagtatgcattttacgcaccatagttgctacacgtgcgatcagcatacgcttaacacgtatatcaggcgggttgactgcccaatcggcacaataatcttcaaggctaattgtgggagtgagatcttcggtaataataaaacttgcgcgagttaatggatttaaccctttttcgccaaacccaatgcccttcattgtatcaacgccaacatcactcaggcgatgaatagcgtgccactctctgtctgcgcccaaaacgggcatccgcaaactgagtagattttttataatctcttttaatgtcgtccccttgtgccatttaagaaaatagcttttcccggacagttcaaagcgtaatgtacgacgagtctccagttcacgaaagacctcgccgttcagttttttgacctctgcaaaagcatctttaccacgccaaagtgtggcaagcggctcttttaattcaaccatctaaaccacctgtaatgatatccgcggctttttctggcaagctatacaaatcctgagtatcggcataatggcgagcattctccgcccaggccattcgcaatgggctctgagttaacgctttacgtaaaacttcatttaattgttcctgagagaaaggttcagcgatgaccgttccacaattggcatccgcaatataatgcgcgtacccacataccgctgttgttaaaacaggtaacccagcagtgatcgcttctagaagaacgatacccgcggcttcctgataagcgggatgcagtaataaatcagcggctgccattaattcactcacatcattgcgaccgaagaagaaatgcacattgctccgcacgccgagtttttctgccagcgcttcaaattttcgcggcttatcctgaccaacaacaaataaaagcgtattgtgacgtaaactttccggtaagcttgccaaagcttcaatactgcgatctacacctttacggccaaaatcacttccaacctgcagtaataagttttgttgctcttttatgccatttttctggcgataaatttcacggctgtttgggatttgctcactgtattttctgtccggataaataccgggaggaagaatttgaaaacgttcaggttcagtttgataatgcttctggaaatcggcgatttgcttatcggtcagcatcataagtttcgtgcttttaccctgctcgaaagtcgctcgctcaaatgcggcataatggcgatatcgacttgttaaacgatataaaaaacctttttcttgcgcaactttctcggcgtaacaaacatcagcggcaaaataaacatccaggccaggcatcttattaaacccaacaacgcgatctgcgggatgctctttgagatgattttgtacccaggcataatattctgcattgcgtccatggttggtatgggacttaactggcacctgaataagctcaaatgctttcgggcaatcgccttcccagctctgtgtatatacccgaacatggtggccccgtgcggcaactgtacttgcaatgcgcataaagtcacgttgaagcccaccaaatggaaaatatttatataaacaaaacgccacgatcataattgtgcattcctgtcagcactaggggcatcttctggcaacagcttttccgtagcggcgatcacatcctccgctgggataacagaaagatattttttgttgcggtcaagttcatgccgggtcggcattttctgataattccccgcccagaattgaataatattctcggtccagggacgccagaatacgtgatccgttgcaccaaatagactaatgactggcgttttcactgccgctgcaatatgtcccggcgcagaatccacaccaataaaaagcactgcatgatcaattaatgcacccagttcaggaaaacgtgttttacctgcaaggccagtaatgggttttgtttcgcaacctcgtgcaatctcatctacacaagcgagatcatctgcgctgggcccacaggttagcacaacctgatagcctcgctgttgcagcgcatcgataaccttagaaaatttatcgttatcccaacacttaaatatctgacgcgctgtcggttggatgacaacataatgatcttttacgcccagggcatctaattcccggcgcatcttcttccagcaatcttcggcgtaactcattgttgtgtcggtgtagaaatcggtaatacctaatggctcaaggacgcttaaattacgctcaacaatatgtgtaccgtgtattggcgctaagtgtgtgaagctttttttccaaataccatgctgccgatgaccataaagttggcttattttcatccgtgcaggtaaacaacgtaccagcagcgccaccatccactgatccgtaagattaatgaccaggtcataattattcgcacgcagagtttttatcaagctaagcacatttttaattttatcgaaagttcccgcacctttattgcttatcccatagagcgcattaatttccgggttttcagacaaaatagggatggtgtcctgataaagcagcatatcgatttttgcatcaggataattctgcttgagcgtactgatgacaggagtagttaataacatatccccatgatatcgcatctttatgaccaggatttttcgaaatggcttttccactagcgactcttttgtgtgattgtctggttaagttaagcagaaaaaagcacgctaccgccccaggctcaacagctacctgaatactgataacgcacttactttgacgtgctagtgtatcatttctttcgcagcaatccgacccgaatgatttttatacacaaaatatactttaatcataaaaatcaaatagataaaaaatagcatttcgataatgtcagtacggcctatgtagatttgaaaatggggccgagtttcaatgaatcgcataaaaatacaaaaaaaatgaagatgtagcggcagatcagaccaaactgaagctatttaagtcaaaaacgggaaaagtaatggtaaagccacagctaaatacatagaatccccagcacatccataagtcagctatttactatgctcgaattgctttacaccgcccttctctaccttattcagccgctgatctggatacggctctgggtgcgcggacgtaaggctccggcctatcgaaaacgctggggtgaacgttacggtttttaccgccatccgctaaaaccaggcggcattatgctgcactccgtctccgtcggtgaaactctggcggcaatcccgttggtgcgcgcgctgcgtcatcgttatcctgatttaccgattaccgtaacaaccatgacgccaaccggtagcgagcgcgtacaaagcgctttcgggaaggatgttcagcacgtttatctgccgtatgatctgcccgatgcactcaaccgtttcctgaataaagtcgaccctaaactggtgttgattatggaaaccgaactatggcctaacctgattgcggcgctacataaacgtaaaattccgctggtgatcgctaacgcgcgactctctgcccgcagcgccgcaggttatgccaaactgggtaaattcgtccgtcgcttgctgcgtcgtattacgctgattgctgcgcaaaatgaagaagatggtgcacgttttgtggcgctgggcgcaaaaaataatcaggtgaccgttaccggtagcctgaaattcgatatttctgtaacgccgcagttggctgctaaagccgtgacgctgcgccgccagtgggcaccacaccgcccggtatggattgccaccagcactcacgaaggcgaagagagtgtggtgatcgccgcacatcaggcattgttacagcaattcccgaatttattgctcatcctggtaccccgtcatccggaacgcttcccggatgcgattaaccttgtccgccaggctggactaagctatatcacacgctctagtggggaagtcccctccaccagcacgcaggttgtggttggcgatacgatgggcgagttgatgttactgtatggcattgccgatctcgcctttgttggcggtagtctggttgaacgtggtgggcataatccgctggaagctgccgcacacgctattccggtattgatggggccgcatacttttaactttaaagacatttgcgcgcggctggagcaggcaagcgggctgattaccgttaccgatgccactacgcttgcaaaagaggtttcctctttactcaccgacgccgattaccgtagtttctatggccgtcatgccgttgaagtactgtatcaaaaccagggcgcgctacagcgtctgcttcaactgctggaaccttacctgccaccgaaaacgcattgaggttgttatgcaaaaacgggcgatttatccgggtactttcgatcccattaccaatggtcatatcgatatcgtgacgcgcgccacgcagatgttcgatcacgttattctggcgattgccgccagccccagtaaaaaaccgatgtttaccctggaagagcgtgtggcactggcacagcaggcaaccgcgcatctggggaacgtggaagtggtcgggtttagtgatttaatggcgaacttcgcccgtaatcaacacgctacggtgctgattcgtggcctgcgtgcggtggcagattttgaatatgaaatgcagctggcgcatatgaatcgccacttaatgccggaactggaaagtgtgtttctgatgccgagcaaagagtggagctttatctctagtagcttggtgaaagaggtggcgcgccatcagggcgatgtcacccatttcctgccggagaatgtccatcaggcgctgatggcgaagttagcgtaacgtttatgccggatggtatgccatccggcgcgcatgaattacttctggcactgccgacaataaaacgttgcccgctgcgcatgtttagtcgccacaatcggcgtaccgcacacccgacacggctcaccttttcgcccgtaaacctgcaattcctgagcgaaatagcccggtttaccatcactttgcagaaaatctttcagcgttgtaccaccctgctcaatgctacgcagcaacaccgctttaatcacccgagctaacaattcacactctgccaggctcagactactcgccagccgatccggatggatccccgccgcaaacagactttcgctggcatagatattccctacccctaccaccagcttgttatccatcagccacggtttaatcgccgtttttttcttcgcgcacttctgatgcagatactcaccattgaaatcgtcgctaagcggctccggtccaagatgggtcagcacattatgcccttccagctctttggtccacagccaggcaccaaagcggcgcggatcggtgtagcgcagcactttgccgttgctcatcaccaaatccacatggtcatgcttttcagggggaagttcttctggaaggatgcgcaggctgccagacatccctaaatgaatgataatccagccctcaggcagctccagcagcagatatttagcccgccgctgcacgctaagcactggttggtcgcttaaacggtagatctcttcactaaccggccagcgcaagcgtccgttgcgcaccactgcatgaagaatggttgcaccaacgagatgcggttctatgccgcggcggctggtttcaacttcgggtaattcaggcatagcatctccaggaatgaacagatgcagtcaatatgggggcaagcagataacaaaaaaccccgccggagcgaggttttttgttacatcaaagcgagaattatttgattttcgcttctttgtagatcacgtgctggcgaacaactggatcgaattttttcagttccagtttttccggcttagtacgtttgttcttcgtagtggtatagaagtgaccagtaccagcagaagaaaccagcttgattttctcacgaatacctttagccatgatttatttcctctaagtacttagtacttttcgccacgggcacgcagttcagccagaactgtatcgatgccttttttatcgattacacgcatacctttagcagatacgcgcagggtgacaaaacgcttctcgctctcaacccagaaacggtgagagtgcaggttcggcaggaaacggcgtttagtcgcgttcagtgcgtgggaacggttgttaccggtcaccggacgcttgccagtaacttggcagactcgggacatgtctattctccaaaaatcaaattagctcgagcttcgtatggggtattggcgcctcgtcaggctttacagcccggtcatcgcagttctatgtgaactctcgattgccaggcccaaatgccaaacccgagattctcaaaggtggcgtagtatacgctgactcagcgatgtgctcaagtcccgaacagacaaagatcccgaaggatcgcgcatagcgggttaaatccagccgcgttcggcaaaagaaacatactctccacgcccaatcacgatatggtcgagcacgcgtaaatccatgaactgacaactctttattatccgttcagtaatgagtttatccgctttactgggttcagcacaaccgctagggtgattatgtgcaaggatcagcgcgctggcgtttatttttatcgcttcgcggataatttcccgaggatggacttcaacatggtttagcgtgccggaaaaaagacgcctatgcgttataacccggtgttgggagtcgagaaagatcaccataaagatctcccgctcctcacccgtgagctggctttgtaaaaattccctcgtcatctccgggctgagtaaagggctttcttcacgcatccgcacgttgtagtaacgccgcgccagttcagcaatcccctttaactgggcaaatttcgccacgccaattccatgaacgccactaaattgttcatattcagaggttaacaagccataaagagagccgaaattctccagcatctcttttgccagggttaatacatctttaccgcgcgttccggtacgcagaaatagcgccagcagctcgacatccgttaaggcgctaataccaaacttcagcattttttcgcgcggcatcaacagctgactattgtttttcaccttcacctcctttgtggtgctcgcatcctgtcatagccgtttcgttaaatcgacggccagttttcaatcctggaaagcgcctcgcaaagtgaatctcaggtgaaggcacgacaacaaaagtattgtgataaaatcgccaacttctggtgtcaccctacaggaaaaatcatcatgagcctggccggtaaaaaaatcgttctcggcgttagcggcggtattgctgcctataaaacccctgaactggtgcgtcgtttgcgcgatcgcggggccgacgtccgcgtagccatgaccgaagcggcaaaagcctttatcaccccacttagcttgcaggcggtttctggttatcccgtttccgacagtctgctggacccggcagccgaagccgctatgggccatattgagctgggtaaatgggctgatttagtgattctcgcccctgccacggcagatttgattgcccgtgttgctgccggaatggcgaatgacctggtaagcacgatttgtctggctacacctgcgcctgtagccgtgctccccgccatgaaccagcagatgtaccgtgccgctgccacgcagcataatttagaggtgcttgcttcccgtggtttgctcatctgggggccagacagtggcagtcaggcttgtggtgatatcggtcctgggcgaatgctcgatccgttaaccattgtggatatggcggtagcgcattttagccccgtcaacgacctgaaacatctgaacattatgattaccgccggcccgacgcgtgaaccgctcgatccggtgcgttatatctctaatcacagctccggcaagatgggttttgctatcgccgccgccgctgcccgtcgtggcgcgaacgtcacgctggtaagtggtccggttagtctaccgacgccaccgtttgttaaacgtgttgatgtgatgaccgcgctggaaatggaagccgccgtgaatgcttctgtacagcagcaaaatatttttatcggctgcgccgccgtggcggattatcgcgcagctaccgtggccccagagaaaatcaaaaagcaggccacgcagggtgatgaattaacaataaaaatggttaaaaaccccgatatcgtcgcaggcgttgccgcactaaaagaccatcgaccctacgtcgttggatttgccgccgaaacaaataatgtggaagaatacgcccggcaaaaacgtatccgtaaaaaccttgatctgatctgcgcgaacgatgtttcccagccaactcaaggatttaacagcgacaacaacgcattacaccttttctggcaggacggagataaagtcttaccgcttgagcgcaaagagctccttggccaattattactcgacgagatcgtgacccgttatgatgaaaaaaatcgacgttaagattctggacccgcgcgttgggaaggaatttccgctcccgacttatgccacctctggctctgccggacttgacctgcgtgcctgtctcaacgacgccgtagaactggctccgggtgacactacgctggttccgaccgggctggcgattcatattgccgatcctagtctggcggcaatgatgctgccgcgctccggattgggacataagcacggtatcgtgcttggtaacctggtaggattgatcgattctgactatcagggccagttgatgatttccgtgtggaaccgtggtcaggacagcttcaccattcaacctggcgaacgcatcgcccagatgatttttgttccggtagtacaggctgaatttaatctggtggaagatttcgacgccaccgaccgcggtgaaggcggctttggtcactctggtcgtcagtaacacatacgcatccgaataacgtcataacatagccgcaaacatttcgtttgcggtcatagcgtgggtgccgcctggcaagtgcttattttcaggggtattttgtaacatggcagaaaaacaaactgcgaaaaggaaccgtcgcgaggaaatacttcagtctctggcgctgatgctggaatccagcgatggaagccaacgtatcacgacggcaaaactggccgcctctgtcggcgtttccgaagcggcactgtatcgccacttccccagtaagacccgcatgttcgatagcctgattgagtttatcgaagatagcctgattactcgcatcaacctgattctgaaagatgagaaagacaccacagcgcgcctgcgtctgattgtgttgctgcttctcggttttggtgagcgtaatcctggcctgacccgcatcctcactggtcatgcgctaatgtttgaacaggatcgcctgcaagggcgcatcaaccagctgttcgagcgtattgaagcgcagctgcgccaggtattgcgtgaaaagagaatgcgtgagggtgaaggttacaccaccgatgaaaccctgctggcaagccagatcctggccttctgtgaaggtatgctgagtcgttttgtccgcagcgaatttaaataccgcccgacggatgattttgacgcccgctggccgctaattgcggcacagttgcagtaatatgacgccggatgacttttcatccggcgagtttctttaaacgccaaactcttcgcgataggccttaaccgccgccagatgttccgccatttccggcttctcttccaggtaagcaatcaggtctttcagggtgatgatagagatcactttgcagttgtaatcacgctcaacttcctgaatcgcgctaatctcgccgcgcccgcgttcctgacgatcgaggctaatcaacacgccagcaagcgtcgcgccattggcctgaataatctccatgctctcgcgaatcgccgttccggcggtgatcacatcatctaccagcattacgcgtccttgtaacgcgctaccaaccagattgccgccttcaccgtggtcttttgcttctttgcggttaaagcagtacggcaggtccaggtcgtgatgctccgccagtgccacagcggttgtggtggcaatcgggatccctttgtaagcagggccaaacagcagatcgaactcaatgccggaatccaccaacgcttcagcgtaaaaacggcctaacagtgccagatcgcgcccggtattaaacagcccggcgttgaagaaataggggcttttgcgcccggatttcagcgtaaactcgccaaactttaacacctgcttgctaagcgcaaattcaataaactggcgctgatatggtttcatgccttcgctcctcatcttacttttctacagacaaaaaaaaggcgactcatcagtcgccttaaaaatcagtttgccagcgccgccttctgcgtcgttacaatggattgctttcccctcgggccagagccaacaagatgagtagctcttcatgggtgaacggctcgccttctgccgtcccctgcacttcaatgatgcgcccgtcttcggtcatcactacgttcatgtcggtctctgcggcagagtcttcaacgtattccagatcgcaaaccgcttcgccgttcacaattccgacagaaactgcggctaccatccctttcatcggattggttttcagcttgccgttttccaccagcttctgtagcgcatctaccagcgccacgcaggcacccgtaatgctcgcggtacgcgtgccaccatcagcctgaagcacgtcgcagtccagcgtaatggtgaactcacccagcgctttcaaatctactgccgcgcgaagagcacgggcgatcagacgctggatttccattgtgcgtccaccctgcttacctttcgccgcttcacgagcgttacgggtgtgggtagaacgtggcagcatgccgtactctgcggtgatccagccctggccctgacctttcaggaagcgcggcacgccttcttcaatagaggcggtacacaacactttggtatcgccaaattcgaccagcacgctgccttctgcatgttttgtatagttacgagtcagggtaacgggacgcacctgattattgctacggcctgctggacgcatattgaaatctccggcttgaaacaaatgtggctgcgcattatacggacttccggcggttattcctatcctgacaaggcatcgatggctataatccttccacctctccttttataaacaggaacgtctatgatccgcagtatgaccgcctacgcccggcgtgaaatcaagggtgaatgggggagcgcaacctgggaaatgcgcagcgtaaaccagcgttatctggaaacttactttcgtctgccggagcagttccgtagccttgaacctgtcgttcgcgagcgtattcgttctcgcctgacgcgcggtaaagtggaatgtaccctgcgctatgagccagatgttagcgcgcaaggtgagctgatcctcaacgaaaaactggctaaacagctggtaactgccgcgaactgggtaaaaatgcagagtgacgaaggggaaatcaacccggttgatattctacgctggccgggcgtgatggcagcccaggagcaggatcttgacgccattgccgctgaaattctcgcggcgctggatggtacgctggacgactttattgtcgcgcgcgaaaccgaaggtcaggcactgaaagcattgatcgagcagcgtctggaaggcgtcaccgccgaagtggtcaaagtccgctcccatatgccggaaatcctgcaatggcagcgtgagcgtctggtcgcgaagctggaagatgctcaggtgcaactggaaaacaaccgtctggagcaggaactggttctgctggcacaacgaattgacgttgccgaagaactggatcgcctcgaagcgcatgtcaaagagacctacaacattctgaagaaaaaagaagcggttggtcgtcgtctggattttatgatgcaggagttcaaccgcgagagcaacactcttgcgagcaagtctatcaatgccgaagtgacaaactccgccatcgagctgaaagtgttgattgagcagatgcgcgagcagattcagaacatcgaataactcgtaacgccaattcttacttttccgccttcacaaatgccgccactcaaacagagcggcatttttcttccccgcaacattcaattctgttttgcgtgcctgctccagattttgcgatgtttttttgcccagcacactgagaacgtgagatactcacaactgtatataaatacagttacagatttactttctttgcaattgatatcacatggagtgggcaatgaacgaacatcatcaaccttttgaagagataaaactgattaatgcaaacggagcagaacaatggagtgcaagacaacttgggaaactactgggttatagtgagtatcgtcactttatacctgtattaacgcgcgccaaagaagcctgtgagaacagtggtcacacaattgatgaccatttcgaggagatcctcgatatggtcaaaattggcagtaatgccaaaagagcattaaaagacatcgtactctcccgctatgcctgttacctggtagtacaaaacggcgaccctgcgaaaccggtcattgcggcagggcagacttattttgctatccagacccgacggcaggagcttgctgacgatgaagcatttaagcaacttcgtgaagacgaaaagcgtctgtttctgagaaatgagttgaaagaacataacaaacaattggttgaggcagcacagcaagctggggtagcgacagctactgatttcgccatatttcagaatcatggttaccaggggctgtatggtggattagatcagaaagctattcatcagcggaaggggctgaaaaagaatcagaagatcctggatcatatgggtagtacagaactggcggctaatctctttcgagctacccaaacagaagaaaaactcaagcgggatggcgtgaatagtaaacagcaagcaaacaccacacactttgacgtgggtcgcaaggtgaggcaaaccattcaggaacttggcggaaccatgcctgaggagttgccgaccccgcaggtcagcatcaagcagttggaaaacagtgtaaaaattacagagaagaaataacagaaactaaaaactctttttgttgattgagacacccgatgcgtaagccaaggtccaggtgcagtgaacacaatggctaaatattgcacctttcttttccccctcagttttaacctattttttcttatgcattttctcagacaagaagtcagaagaatgcatctctgctacagaaaatagcgatttcacataactacaagttatcaatttcccctccccttaaaaaatctcaatcgtgacaatgcgcacaaatcgctaccctgccagacagatttttagggagagaaccatgctgttacacattttgtatttggttggcattactgccgaagccatgacgggggcgctggcggccggacgacggcgcatggatacatttggcgtaattattattgcgaccgccaccgcaattggcggagggagtgtgcgcgatattctgctgggccactatccgctcggctgggtcaaacacccggaatatgtgattatcgtcgctaccgccgcagtactcaccactatcgttgctcctgtaatgccttacctgcgcaaagtgtttctggtgctcgatgcgctcggactggtggtcttttctatcatcggggcacaggttgcactggatatggggcacggcccaattattgccgttgtcgcggcggtaaccaccggcgtgtttggcggcgttttgcgcgatatgttctgtaaacgtatcccactggtattccagaaagagttgtatgccggtgtcagttttgcctccgccgtgctgtacatcgcgctgcaacactatgtttctaaccatgatgtggtaattatctccaccctggtattcggcttttttgcccgcttactggcgctacgccttaagctgggattaccggtcttttactacagccacgaaggacattaaggttcaaaacctgtgatctgctgggcagccagccaactgcccagcttcttgatttgcgcattttccttccattcaataacctgtctggcgcgtccgcttccagtccccggcagctgctgccagaactgctccgtgctaaataaaagttggctccaggaccgttcatcactggcattaagcgccgcccgggttagcggtattcccattgccatcacccagcgagtaaaaggctgcttacgagccagattaaactgatgccatagctgcgcacttttacttttcgcgatccccggcgtgttctgtaattgctctggcgttaataaaagccaggaaaagatatgttcaaagcgatgagtctgatgcagcgcgcgccaaccggcctcaccaatgccatccagcccaagaacctgttttgcccccagccagactaagcgactaatgaactgttcctgacaaacatcagaagcaaagtagcaggtcaagctgttaaagcggttttctggcggtgtcggttttgtacgttctgcaccgcgccacaccacatcatcaatgcgaggaataccctgaccggcaaggctgacgagaatctgatcaccaggcgcaatatcccactcctgccagcgcctgacggaaccaatattcacccgctggacttttttatcatccagcatgacaggtgcgagactcgcaaccacgcttattttaccgctcttacccaccgcaaactgaattgccttcacttcggcaacctgagctacaggttgatatttccaggccaccagccactctgcctggcccggtagccaatggcgggattctggctctttcgccgctcgtacaactacgccatcggtgacgaagggtaattccgctttccaccactcattgcgtacgcgcgcaacttcatcagcatttttcaccgcacgggtatacgtctgcgttagagtaaaacctgcggtagccagctcttttaaacgatcagacattaactgcggtccatccggccatgcccagacaaaaacgcccagagaattcagcgtgtcgctatcgtcctggcgcatcatcaagccagcaacttttgcgcgggcatttattccccccatttgttgttggatatgcccctcgcgctggagaaatatttccccctgaagcgtactgttggctaaaggcccgctaacggtttgcggcacagcggaaattaagctaactttctgcgtccagtcctcgcctttcaggccattaccgcgactgattgctttgttcagtttcccgtcccgataaaccagggttaccgcaacgccatcaacttttggctgcacccaaagatcgctacgttctcgcatccacagacttaatgcgtttttatccaccattttgcgtacacccgtatgggcaaccggatgcataaccgcaccatttaaaggcggcatcatcacgtcgcggggctcgctcccaaagcagcgttgccactgcgtaagacgggcgcttaactgatcgtaaacaccgtcttccacctcactttttccttccttccagtagtcatcgtcccactgttttatttgctgttgcaggcgggaaatttcttcctgtgctctggctgggctccaggccggacagaccgcccacacagaactttgccagcacaagatacctattaatatcgccatccatactttcatcatcacctccgctgtagatagtcaggcagatatacaacgtgatgaaagcaaagccgagtggcaaaaacggagtctgcgaggacgcttcctgaaaatcgtctttattgcagtgaatgacaggcaaatgcggaagcagctacgcaaaacgcaacaactttgcgcaaaaagtgtgagcaagggctacgtcacatggccgcgccgtgtataataagctcgtatgtaggctttatttcgctaatcacatacgaaagatactcatggctcaaggcacgctttatattgtttccgcccccagtggcgcgggtaaatccagcctgattcaggctttattaaaaacccaaccgttgtgtgacacccaggtttctgttagtcacaccacacgccaaccgcgtcctggtgaagtccacggtgaacattatttctttgttaatcatgatgaatttaaagaaatgattagcagagatgcgttcctcgaacacgcagaagtttttggtaattactatggcactagccgtgaggccattgagcaagtactggcgaccggtgtcgatgtttttctcgatatcgactggcagggcgcgcagcaaattcgccagaagatgccgcacgcgcggagtatctttattttaccgccgtccaaaattgaactggaccgccgtctacgcggtcgcggtcaggacagcgaagaggtcattgcaaagcgtatggcgcaagctgttgcagaaatgagccattacgccgaatatgattatctgattgtgaatgatgacttcgataccgcgttgaccgatttgaagaccattattcgcgccgaacgtctgcgcatgagccgccaaaagcagcgtcatgacgctttaatcagcaaattgttggcagactgaacctgatttcagtatcatgcccagtcatttcttcacctgtggagctttttaagtatggcacgcgtaactgttcaggacgctgtagagaaaattggtaaccgttttgacctggtactggtcgccgcgcgtcgcgctcgtcagatgcaggtaggcggaaaggatccgctggtaccggaagaaaacgataaaaccactgtaatcgcgctgcgcgaaatcgaagaaggtctgatcaacaaccagatcctcgacgttcgcgaacgccaggaacagcaagagcaggaagccgctgaattacaagccgttaccgctattgctgaaggtcgtcgttaatcacaaagcgggtcgcccttgtatctgtttgaaagcctgaatcaactgattcaaacctacctgccggaagaccaaatcaagcgtctgcggcaggcgtatctcgttgcacgtgatgctcacgaggggcaaacacgtagtagcggtgaaccctatatcacgcacccggtagcggttgcctgcattctggccgagatgaaactcgactatgaaacgctgatggcggcgctgctgcatgacgtgattgaagatactcccgccacctaccaggatatggaacagctttttggtaaaagcgtcgccgagctggtagagggggtgagcaaacttgataaactcaagttccgcgataagaaagaggcgcaggccgaaaactttcgcaagatgattatggcgatggtgcaggatatccgcgtcatcctcatcaaacttgccgaccgtacccacaacatgcgcacgctgggcagtcttcgcccggacaaacgtcgccgcatcgcccgtgaaactctcgaaatttatagcccgctggcgcaccgtttaggtatccaccacattaaaaccgaactcgaagagctgggttttgaggcgctgtatcccaaccgttatcgcgtaatcaaagaagtggtgaaagccgcgcgcggcaaccgtaaagagatgatccagaagattctttctgaaatcgaagggcgtttgcaggaagcgggaataccgtgccgcgtcagtggtcgcgagaagcatctttatagcatttactgcaaaatggtgctcaaagagcagcgttttcacagcatcatggacatctacgctttccgcgtgatcgtcaatgattctgacacctgttatcgcgtgctgggccagatgcacagcctgtacaagccgcgtccgggccgcgtgaaagactatatcgccattccaaaagcgaacggctatcagtctttgcacaccagcatgatcggcccgcacggtgtgccggttgaggtccagatccgtaccgaagatatggaccagatggcggagatgggtgttgccgcgcactgggcttataaagagcacggcgaaaccagtactaccgcacaaatccgcgcccagcgctggatgcaaagcctgctggagctgcaacagagcgccggtagtagctttgaatttatcgagagcgttaaatccgatctcttcccggatgagatttacgttttcacaccggaagggcgcattgtcgagctgcctgccggtgcaacgcccgtcgacttcgcttatgcagtgcataccgatatcggtcatgcctgcgtgggcgcacgcgttgaccgccagccttacccgctgagccagccgcttaccagcggtcaaaccgttgaaatcattaccgctccgggcgctcgcccgaatgccgcttggctgaactttgtcgttagcagcaaagcgcgcgccaaaattcgtcagttgctgaaaaacctcaagcgtgatgattctgtaagcctgggccgtcgtctgctcaaccatgctttgggtggtagccgtaagctgaatgaaatcccgcaggaaaatattcagcgcgagctggatcgcatgaagctggcaacgcttgacgatctgctggcagaaatcggacttggtaacgcaatgagcgtggtggtcgcgaaaaatctgcaacatggggacgcctccattccaccggcaacccaaagccacggacatctgcccattaaaggtgccgatggcgtgctgatcacctttgcgaaatgctgccgccctattcctggcgacccgattatcgcccacgtcagccccggtaaaggtctggtgatccaccatgaatcctgccgtaatatccgtggctaccagaaagagccagagaagtttatggctgtggaatgggataaagagacggcgcaggagttcatcaccgaaatcaaggtggagatgttcaatcatcagggtgcgctggcaaacctgacggcggcaattaacaccacgactagcaatattcaaagtttgaatacggaagagaaagatggtcgcgtctacagcgcctttattcgtctgaccgctcgtgaccgtgtgcatctggcgaatatcatgcgcaaaatccgcgtgatgccagacgtgattaaagtcacccgaaaccgaaattaatgttttatgaacccaacacgttatgcacgcatctgcgaaatgctcgccaggcggcagcctgatctgaccgtctgcatggagcaggtccacaaacctcataacgtttctgcgattattcgtaccgcagatgccgttggcgtacatgaagttcacgccgtctggcctggtagccgcatgcgcaccatggctagcgcagcggcgggtagtaacagctgggtacaggtgaaaacacaccgcaccattggcgatgccgtcgctcatctcaaaggccagggcatgcagattctggcaacccatctttctgataacgctgtcgatttccgcgaaattgattacactcgcccgacctgcattttgatgggacaggagaaaacgggcatcacgcaggaagcattggccctggcggatcaggacatcatcattccgatgatcggcatggtgcagagcctgaatgtttccgttgccagtgccctcattctttacgaagcccagcgtcagcggcaaaatgcaggcatgtacctgcgtgaaaacagcatgttgccggaagcagagcaacaacgcctgttgtttgaaggcggctatccggtgctggcgaaagtcgcaaaacgcaaaggcctgccttatccccacgtcaatcagcaaggcgagatcgaagctgatgccgactggtgggctactatgcaggctgcagggtaagtgccatgaaaggtcgcctgttagatgctgtcccactcagttccctaacgggcgttggcgcagcacttagtaacaaactggcgaaaatcaacctgcataccgtgcaggatctactcttacaccttcccctgcgctacgaagatcgcacccatctctaccccatcggagaactactgccgggcgtttatgccacggtggaaggcgaagtgctgaactgcaatatctccttcggcggtcggcggatgatgacctgccagatcagcgacggttccggcatcctcaccatgcgctttttcaatttcagcgcggcaatgaaaaatagcctggcggcgggccgccgtgtactggcttatggcgaagcaaagcgcggtaaatatggtgcggagatgatccacccggaataccgcgtgcagggcgatctcagcacgccagaattacaggaaacgctcacgccggtttatccaacaacggaaggcgtaaagcaggccacgctgcgtaaattaaccgaccaggcgctggatctgctcgacacctgcgccattgaagaactcctgccgccggaactgagtcaaggaatgatgacgctaccggaagcgttgcgcactttgcaccgcccgccaccgacgctacagcttagcgatctggaaaccgggcagcatccggcgcaacgtcgtctgattctggaagaactgctggcgcacaacctcagcatgttagccttacgtgccggagcacagcgttttcatgcccagccgctgagcgccaatgacacgctgaaaaataaactcctcgccgccttaccgttcaagccaacgggcgcacaggcacgcgtagtggcggagatcgagcgcgatatggcgctggatgtgccgatgatgcgtctggtgcagggcgatgtaggttccggtaaaacgctggtcgccgccctcgccgcgttgcgtgcgattgcccacggcaaacaggtagcattgatggcaccaaccgaattactcgccgagcagcacgccaataacttccgcaactggtttgcaccgctcggtatcgaagtgggctggctcgccggtaagcagaaaggtaaagcacggctggcacagcaggaagccatcgccagcggtcaggtgcagatgattgtcggtacacacgccatcttccaggaacaggtgcagtttaacggcctggcgctggtgattatcgacgaacagcatcgttttggcgtgcatcagcgtctggcattgtgggagaaaggccagcagcagggcttccatccgcatcagttgatcatgaccgccacgccgatcccccgcacgctggcaatgactgcgtatgccgatctcgataccagcgtgatagatgagctgccgccaggccgcacgccagtgactacggtcgctattcctgatacccgccgtaccgacatcattgaccgcgtgcaccacgcctgcataactgaaggtcgtcaggcatactgggtttgtacgttgattgaagagagcgaattgctggaagcgcaggcggcggaagctacctgggaagagttgaaactggcgctaccagagttgaacgttggcctggtacacgggcggatgaaacctgccgagaaacaggcggtgatggcgagctttaaacaaggtgagctacacctgctggttgccacaaccgttattgaagtcggcgttgatgtgcctaacgccagtctgatgattatcgaaaacccggagcgtctgggtctggcgcagttacaccagctgcgcgggcgcgtaggtcgtggcgcggtggcttctcactgcgtgctgctctacaaaacgccgctttctaaaacggcgcaaattcgcctgcaagtgctgcgcgacagtaacgacggttttgtgattgcgcaaaaagatctggagattcgcggccctggcgaattgttaggcacgcgtcagacgggtaatgctgaatttaaagtggcggatttactgcgcgatcaggcgatgatcccggaagttcagcgcctggcacgccatattcacgaacgttacccacaacaggcaaaagccctgatagaacgctggatgccggagacggaacgttacagcaatgcgtaaaaggcggcagtgagaagaccgccatttcaggttaccctaccttcctgccggatgcgattcatcaccctacaaattcaataaattatgaatcaatacgcaggcttgataagcgaagcgtatcaggcatttgtctttgttgcggcggcacttctaccgccgcttcatcggttaaccggcaaaaatcggcaacatcaaatacaacttaattaccagcgcattgacgatatcgataaagaacgcaccgaccatcggcaccaccaaaaacgccatgtggcccgggccaaagcgttcagtgatcgcctgcatgttggcgattgccgttggcgttgcaccgaggccaaaaccacagtgacccgcagccagcactgccgcatcgtagtttttgcccatcatgcgccaggtaacgaagatggcatacaacgccatgaagatggtctgtaccaccagaatcgccagcatcggcagcgccaggctagccagctcccacagtttcagccccatcaacgccatcgccaggaacaagctcaagcttacgttacccagcacggataccgcacgctcaaagacgcggtaaaagcccattatactcagaccgttgctcagaatcacgccaacaaacagtacacagacgaaggtcggcagttcaaaagcagtgccagccaaaagttgcgcaacaattttccccaccgtcaggcagatagcaatcagcgcgatagtttcaatcagcaccaagctggtgatcatgcgtcccacatccggcttttcaaacgccgtcgggacttcctggtcatccggaataccgttcggcgtggtggagtgtttcaccagatagcgcgccaccggaccgccaatcaagccgcccagcaccagaccgaacgttgcacaggccatcgccacttccgtcgcattggtgaagccataacgttcaatgaacaatttactccacgcagcgcccgtaccgtgaccgccggaaagagtaatagaaccggccaacagccccatcagcggatcaagccctaacaagctagccataccaatgccaatggcattttgcatcaccaacagaccaacaaccacaatcaagaagatgccaaccacacgcccaccggcacgcaaactggcaatgttggcgttcaggccaatggtggcgaagaaagccagcattaacggatcgcgcagggacatatcaaagttgacttcccagcccatgctttttttcagtactagtagcgccagcgccaccaacaaaccacccgcaacaggttccggtatggtgtatttcttcaaaaaggagacggaatggaccaacttacgcccgagcagcaacgtcagcgttgcggcaacaagcgttgctaaagtatcgagatgaaacatagttactcctttgtatccgcatcactctttcatactcgtcatacttcatcgcgcagtggcaacttcatgaactatgacgggtatcgagttatgctttcctgggtcaaattctcagctgttaatgaacaaatggcatggattttaagcagaaaaataccaaaagttatataaaaaagtgcatttatctcatttaaatatttagatgaggatgtggcaaacgtttgcttttctctttcggtcagctaaaatgcccgctttgctaccacgggattgttttcgatgtctgtttccaccctcgagagtgaaaatgcgcaaccggttgcgcagactcaaaacagcgaactgatttaccgtcttgaagatcgtccgccgcttcctcaaaccctgtttgccgcctgtcagcatctgctggcgatgttcgttgcggtgatcacgccagcgctattaatctgccaggcgctgggtttaccggcacaagacacgcaacacattattagtatgagcctgtttgcctccggtgtggcaagcattattcaaattaaggcctggggtccggttggctccgggctgttgtctattcagggcaccagcttcaactttgttgccccgctgattatgggcggtaccgcgctgaaaaccggtggtgctgatgttcctaccatgatggcggctttgttcggcacgttgatgctggcaagttgcaccgagatggtgatctcccgcgttctgcatctggcgcgccgcattattacgccgctggtttctggcgttgtggtgatgattatcggcctgagcctaattcaggttgggttaacgtccattggcggcggttacgcagccatgagcgataacaccttcggcgcaccgaaaaatctgctgctggcaggcgtggtcttagccttaattatcctgcttaaccgtcaacgtaacccttacttacgcgtggccagtctggtaattgcgatggcggccggatatgcgctggcgtggtttatgggcatgttgccagaaagcaacgaacctatgacgcaagaactgattatggtgccaacgccgctctattacggtcttggcattgaatggagtctgctgctgccgctgatgctggtctttatgatcactagcctggaaaccattggcgatatcacggcgacctctgacgtttccgaacagccagtgtccggtccgctgtacatgaaacgcctgaaaggcggcgtgctggcaaacggcctgaacagctttgttagcgcggtgtttaacaccttcccgaactcctgcttcgggcaaaacaacggagtgatccagttgactggtgttgccagccgctatgtcggttttgtcgtcgcgctgatgttgatcgtgctgggtctgttcccggcagtgagcggttttgtacaacacattccagaaccggttctgggcggcgcaacgcttgtaatgtttggcaccatcgccgcctccggtgtgcgtatcgtttctcgtgagccgctgaaccgtcgggcgattctgattatcgcgctgagcctggcggttggtctgggcgtgtctcagcagccgctgattttgcagtttgcccctgaatggctgaaaaacctgctctcctccgggatcgccgcgggcggtattactgccatcgtgctgaatctgattttcccaccagaaaaacagtaattcactggcggcggtaagataattaccgccgcagtctcacctctttaaccattcccgccttgaggattgcgcgtaaatcgtgcataactcccttatgtgcatttcacgggatggaagaccatgaaatttattgggaagctgcttctctacattctcatcgctctgttagtggcgatcgctggcctctattttcttctgcaaacccgctggggagcagaacatatcagcgcatgggtttccgagaatagcgactatcatctggccttcggggcgatggatcaccgtttttccgcgccatctcatatcgtgctggagaacgtcacgtttggtcgtgatggccagcccgcgaccctggtggccaaaagtgtcgacattgcgctaagcagtcggcaactgaccgaaccacgccatgtcgataccatcctgctggaaaacgggacgctgaatctcaccgaccagaccgcgccgctaccgttcaaagccgatcgtctgcaactgcgtgatatggcgtttaatagcccgaatagcgaatggaaactgagcgcgcagcgggtaaatggcggcgtagttccgtggagtccaaaagccggtaaagtgctgggtacgaaggcgcagattcagtttagtgccggaagccttagcctcaatgatgttcctgccaccaatgtactgattgaaggcagtattgataacgatcgcgttacgctgactaacctgggtgccgacatcgcccgcgggacattaaccggaaacgcgcagcgtaacgccgacggcagctggcaagtggaaaacctgcgcatggcggatatacgtctacaaagcgaaaaaagcctaaccgacttctttgcgccattacgctctgtcccgagcttgcagattggtcgcctggaagtgatcgatgctcgtttgcaaggtccggactgggcggtgaccgacctcgatctcagcttgcgcaacatgaccttcagtaaagatgactggcagacacaggaaggcaaactgagcatgaacgctagcgagttcatttatggtagcctgcatttatttgacccgattataaacacggaattttccccgcagggcgtagcgctgcgccagttcaccagccgctgggaagggggtatggtcagaacgagtgggaactggctgcgtgacgggaaaacgttgatccttgatgatgcggcaattgccgggctggaatataccttgccgaaaaactggcaacagttgtggatggaaacgacacccggttggttaaacagcctgcaactgaagagatttagcgccagccgcaatctgatcattgatatcgaccctgacttcccgtggcagctcaccgcgctcgatggttacggtgccaacctgacgctggttaccgatcataaatggggcgtctggagtggcagcgcgaatctgaatgccgccgccgcgacattcaatcgtgttgatgttcgtcgcccgagcctggcgctgaccgccaacagcagcacggtgaatatcagcgaactgagtgcatttactgaaaaaggcattctggaagccaccgccagtgttagtcaaacgccacaacgtcagacacatatcagcctgaatggacgcggtgtgccggtgaatattttgcaacagtggggatggcctgaattaccgttgactggcgacggcaatattcagcttaccgccagtggcgatattcaggccaatgtcccgttgaaacctacggttagcgggcaattgcatgccgtgaacgccgcaaagcagcaagtgactcaaaccatgaatgctggcatcgtttccagcggtgaagttacaagcacggagccggtgcggtaaacatcaatctcgccgggtacgactcagacgtacccggcattccatcaatagattacaacgtaattgtcagcgcattcccttgaggcttcaccaccagcccctgctcactttcagcctggctaccgtcttgcagaccatttactttcacaacattgcgcaggcacagtgtccagttcttcgcctcgcccgcaccagtcacagtaatcgtgttgccagtacgtgctgcttttaaagtaaagatcacgcttccgtcagcagcgggcacttcacagacggcttcatgcccgtcttgcagattgaagaggtggaatgccgtgccttcgtgccacacgtaatcgggacgttgatcgttgttgcccagcgccagtagagtgttatcacgcacataaacgggcagactcaggaagccgtgctgctgtttatgccagcgactaccgtcgagttcatcgttgtgccacaggtgtgtccagcgaccttccggcaggtagaactgcacatcgcccgcttcagtgaacaccggcgcaaccatcacgttgtcgcctaacatgtattgacggtcaaggtaatcacaagccggatcgtccgggaactccatcatcatggcccgcatcatcggcgtaccccgcgcgttcgcacgcgcagcttcacgatacagatacggcatcatgcggcatttcagttgcgtgaagaagcgcaccacatcacaggactcatcatcgtaggcccacggcacacgataagatttgctaccgtgtaaacggctatggctggagagcaaaccaaacgcgcaccagcgtttgtaaacgtgcgccggagcggtattttcaaagccgccgatatcgtggctccagaagccaaaaccactaaggccaatagacaaaccaccgcgcaggctttccgccatactttcgtagttagcgtaacaatcgccaccccagtgtaccgggaatttctgcgcaccgacggaggcgctgcgggcaaacaagacagcttcttcctcaccaacggtgtccttgagcacgttccacaccagttcgttgtagatgtacgcataatggttatgcattttctgcggatcggaaccgtcaaaccactgaacatcagttgggatacgttcgccaaagtcggtcttaaagcaatcaacgcccatcgcgaccagacctttcagtttgtcggcgtaccatttgcaggcatccggattggtaaagtcataaatcgccagacctggctgccatttatcccactgccataggctaccgtccgggcgtttgagtaaatagcctttctcttgtaactctttaaagacgggggatttttgaccgatataggggttaatccagacgcagattttcagtcctttcgctttcaggcggcggatcatcccttccgggtcagggaaagtcagcgggtcccactcaaaatcgcaccactggaaggctttcatccagaaacagtcaaagtggaaaacatgcagcggcagattgcgttccgccataccatcgataaagctgtttaccgtcgcttcgtcgtagttggtggtaaaactagtggttagccacaggccgaaggaccacgcgggcggcagcgccggacgaccagtaaagcgggtataacgatcaagtaccgctttcggcgtcgggccgtcgataacaaagtattcgagatattcactctcaacgctgaactgcactttggagactttctcgcttcccacttcaaaagagacacactggggatgattgaccagtaccccataaccacggttagtcatgtagaacgggatatttttatacgcctgttcagtacttgtgccgccgtcccggttccaggtctctaccgtctggccattgcgcaccagggcagtaaagcgctctcccagaccgtaaactgtttcgccaacgccaagatcaagccgctcaaacatataattgcgttgattattcgtgtcctgcacgtagccattatttttcacctgactaccggtaatacgttcgccgttgcgcagaaaatccagactccagaactcacctttgctgacacgcgcgcttaagttgccacttttaaactcagcataacgttctgtgttttcgattgtgaccttcacgtcctgcaaaatattgagcggataatgaggaccgttattcagcgccccctgaaaatgctcaatccgcacaccgacaataccttcctgtggggagaaaaagcgcaacgtaaataaaggcgtatcaagctgccaggtacgttcacgcacatcacggggggcagcatagaccaccatttcattatcctgctgttcaacctcgaacacctgaagcgggtgaatcaaattgaggccaggttgaatcaaccagtttccatcgctaattttcattgccgttccttagttctgcacttcttgagaggtgaattgttgctggcaacggcgtttaccctgagccagctgttccataacggttttcagattgtgcgtcgtgagactgtagtagcgtttagcgataatcgcgctcagcaaataacagatcgccggaacaatcgtgaatagcgcaataatgatgctaatcgtggcgctgttctgcgctttttctgccgcatcatatccgccataagccagcatccagccgataagagcgccgccgaaggccaaccccagtttgagcacaaacagcgtgccagcaaaactgatcccggtcaggcgtttaccattgcaccactcgccgtagtcgacggtatcggacatcattacccactggataggtgtcaccagttgatgcaacacaccaatcacgaagatgaagacaaacatagtgatgctggcctgcatgggaacaaagaacatcgcgaggctaatcactgccagcagggcgttcgtccaccagaagatagtgactttacatttccagtcggtcagaggttttgccagtgcggaaccaatcaggttacccacgcaataagtggtgagaaaagcgacaaacacttccggcgtgcccaaaatccatgtgacgtaatacatcatcgccccaccgcgtacgcacaccgccaggatattgaaaatggttagtaaaccgacaatccgccactggtcgttttgccagatatcacgtaaatcttcccgcatagacgttgttgtaggtggtgcttcaacgcgttctttagtggtgaagaaacaaaatgccagcatcatgaatgccaccacggaaaggaccgcgataccgccctggaaaccgagtggtttattatcaccgccaattaaattaaccagtggcatcatcagaacagtagaaagcatgcctcccgcggtcgccagcacaaaacgccaggattgcaggctgatacgctgagtcgggtcattggtgattacaccacccaatgcgcagtaagggatattgacgacggtataaagtaaggtaagtagggtgtaagtaattgctgcatagatcattttgccgttcatactgagatctggcgtgctataggccagtacacagacgatcccgaatggcagtgcgccaaacagtacccacggacgaaatttaccccagcgagagcgcgttcgatcggccaacaaccccatgcaaggatcggaaatcgcatccagtgcacgagcgaccaaaaacatggttccgacaaaaccggcaggaatgccaaaaatatcggtataaaagaacatcatatataacattacgttatcgaaaataatgtggctggcggcgtctcccatgccataaccaattttctctttaacggacaacacttcactcttcatctgcttttccttgatgctataggggtgctgagaccgataacgcattttgtaaaccatccctgtgagagcgaatattccgatatctggttattaatttatgattcttgttttatgtgatcgtggtagcgttaattccgctcatatatcattgtaaaatatgggttttatatgaactataatgctttcgtgataatacgctgcgtgtattaggcggaaaaaactgatctgggggatgtagaaactcaaggaagtagctataatgcgccccgcctccatgtagcaatcgaggcgcggaagatcgtcgtctccggtgaggcggctggacttcaaatccagttggggccgccagcggtcccgggcaggttcgactcctgtgatcttccgccaaaatgcctctcctgacgttctccaaccccttgtaatactgtcaatccagatattttctactgctcaatattcaatcggcttcaggaatacctggtctaaggttttgtgatggacgatgagcggctgaagaatccgcctgtcggttcttctgtcctcgaacgcatccgcgatattcacgccagtatgcgccgtgtttatttgcaggtgatttgcccccctgctgactctcagccaactgtatcgccattaaggtgaagatgttgttttactcgccccagaacacccttttttatacgactattctatttctttaaccgctggcgaaaaaaactgactataaacttcaccaataatcagactgccatcaagattaatttgttcatttaatatatcaaatcaacttgttttatttttactatcaaaaatagctcattgccttactataattaatatataaattcggtaattaattcttaacatgcttttactaataatctcaattgctggccctataatattgcgctagcattgctttctggttgtatcagcgatactcaaaaattcttaatacaatactcattcgactggtacttatttgtaactcagttatattttttcgcccggtgattcagaagaatgcaaaaaacggctaccactccaagtaaaatacttgatctcactgccgcggcatttttacttgtcgcctttctgacgggtattgcgggcgctcttcagactcctaccctaagtatattcctcgcagatgaactgaaagcccgtcctataatggtaggttttttcttcaccggtagcgctattatgggaattctggtcagtcaatttctggcaaggcactccgataaacaaggcgaccgtaaattactgattctgctatgttgcttatttggagtgctggcctgcacgctttttgcgtggaatcgcaactacttcattctcctcagtacgggcgtacttctgagtagttttgcttccaccgcaaacccgcaaatgttcgccctcgcccgtgaacacgccgacagaacaggccgtgagacggtcatgttcagtacatttttacgtgctcagatcagccttgcctgggttatcgggccaccgctcgcttatgaactggcaatgggatttagttttaaagtgatgtatctcaccgctgccatcgcatttgttgtttgcggactgatagtctggttgtttttgccaagtatacaaagaaatattcctgtcgttacccaacccgtagaaattttaccctccacccacaggaagcgggatacgcggctactttttgtggtctgtagtatgatgtgggcggcgaataatctctacatgataaatatgccgctatttattattgatgaactgcatctaaccgataaactgactggagaaatgattggtatcgctgccggtctggaaattccgatgatgttaatcgcaggctattacatgaaacgtattggcaagcgactattaatgctcattgctatcgtgagtggaatgtgtttttacgccagcgtactcatggcgacgactccggcggttgagctggaattgcaaattcttaatgccatcttccttggtattctctgtggtatcggcatgctttattttcaggacttgatgcctgaaaaaataggctctgcgacaacgttatatgcaaatactagtcgcgtcggctggattatcgccggctctgttgacggaattatggttgaaatctggagctaccatgcgttgttctggctggcgatagggatgttgggtattgcgatgatttgcctgctgtttattaaagatatttaactcaccagtctgggctaagaaaaatcggcgtggcgcaaacagagccatcctcgccatttttgctatcatgcctgcatacataaacgacaaaacagtatgcagagggaaaaatgggttccaccagaaaggggatgctgaacgttctgattgccgccgtgttgtggggaagtagtggggtctgcgcgcaatacatcatggagcaaagccagatgagcagccagtttttgactatgacgcgtttgatattcgccggtttgattctactgacgctgagttttgttcatggcgataaaatcttttctattattaacaatcataaagatgccattagcctgctgattttttccgtggttggcgcgctaactgtacagctcacttttttgctaaccatcgaaaaaagcaacgcagccacggcaacggtgctgcaattcctcagtccgacgattatcgtcgcctggttcagtctggtgcgtaaaagccgcccgggcattctggttttctgcgctattttgacaagcctggtcgggacttttttattggtgacacacggtaatccgacgagtttaagcatctctcctgccgcgttgttctggggcattgccagcgcatttgctgctgcattctataccacctatcccagtacgctaattgcccgctatggcacgttaccagtcgtcggctggagtatgctgattggcggtctgattctgttgcctttttatgccagacaaggaacaaactttgtcgttaacggcagtttgattctggcgtttttttatttggtggtcattggtacgtccctgacatttagtctgtacctgaaaggagcacaattaattggcggtccaaaagccagcattttgagctgtgcagaaccattaagtagcgcgctactctctttgctgttgctggggatcacgttcacattaccggactggctgggaacgctgctgattctgagtagcgtgattttgattagtatggattcccgtcgccgcgccagaaaaataaatcgtccggcgcggcataagtgagaattaccagccaggcaccgcgccaccgttaaaaatggtttctgccgctttagcgacttcgggactttgataagattgcagaaattccttcacgttttctgcattcttattatcttcccgtgccaccaaaatattcacatacgggctattcttatcttcaataaatacgctgtcgtgcaccggagaaagcccggtctgctgaatgtaagtggtgctgataatcgctacatcaactttgggatcatccagtacgcgcgggagctgcgccccctcgagttccataatctgcaaatgacgaggattatcggttatatccagcgcggtaggtaataacccttttccctctttcagagtaattagcttctctttttgcaacagtaaaagtgcgcgaccaaggttggtcgggtcgttggggatcgccactgtcgcgccttcttttatttgcgccacggttttgatttttttggaataacccgccatagggaagacaaacgtatttcccaccgctaccagtttataaccatgcgcctgattatcttgttcaagaaagggtcgatgctggaagacattcgcatcaagttcgccatgatttgtcgcatcgttcggtagcaagctaccgctaaatcctaccagttcaacatcgaggccatatttctcttttgccacctttttagcgacttccgcgacatcttgttctgcgccatttataacgccaactttaatgtgttttgcatcgctgctactctggtcgcaacctgccagcagaattccggccagcaataatgcggcccctgtccgtagatgatgtgttgtcagtttcatttttttatccttttattaatgattacctgactatagcggtaaggtcgctgcggtttaaaaaacgaaacgctatcgataagaataaaaaggaataaaagtggaatataaagtctggcacttcttactgaccacgcaagcgcgtttcgtacagcatgatgagagcgatgaaagcaaactacacttatgcttcattcgatacacatttgtaaaaggttgaatccatgaaaccaacgacactactgcttattttcacttttttcgctatgccaggcatcgtatacgccgagagcccttttagcagtctgcagtccgcaaaagagaaaaccacggtattacaagatttacgtaaaatttgcacgccacaggcgagtttaagtgatgaagcgtgggaaaagttaatgttgagtgatgaaaacaataaacaacatatacgcgaggccatcgtggcgatggaacgtaataatcagagcaattattgggaagcgttgggtaaggtagaatgcccggatatgtaagaacagcaacaactactgaccaacgcttctttacctgatatcaggatttcttcattttcacctttgcagtaaccaacaatgcagtcagcaacatcaatgtgccggacaacatcaacgggctagtcagaccaatattatccagcgcataaccgccgattgccgcgccacaggtattagcaagctgaataaccgccacctgaatagacccggctttttctgcctgatcggccaggctgcgggtgatccacgtactccagccgacgggaaccaatgcaaaagttagcccccagataatcgccacgccggtagcaacgattttatcgcttccccacaacgtcagtaccaacgcactcacagccagtattaacggcgcgcctgctaaggccagttttacgctacgtttaagaatgaagctgctaaggctcgtaccaataaagctggcgataccaaaactcaacagcaccagcgttaagccatccacgccgaatcccgccaggttcatatacaccgggcgaatatacgtgaagaaagcaaactgcccggcgaaagacatgaagatggcgatcatccctgccatcacacccggacgttgtaataagcggaaagtattttgtttctgatggctgggttcgcctggcagactaggcaaacttttgataatccagaaaatacacagcacgcccatcaccgccgccgcattaaagacattgcgccaaccgataagctcgcctaaaaaactgcccaacggcgcggcaatcaccagcgcaatagaaaccgcgccgaagatcacgctcagcgccttcggcaccgtacgcggcggcaccagacgcatggtcaggctcgcgctcatcgcccagaacccgcccagcgccagccccagacaggcacgaccgattaaaagcaaactgaaactgttagcaaaggaaaccagcaagcaggagagcgtcagcaaaacggcaaacaaaataacaacgtagcggcggtcagtagcctgaattgtctgggtaataaacaaactggcaaacattgccacaaaggcggtcacggtcacgctttgcccggcaaccccttcgctaatgcctaaatcctgggccattggcgtcaacaaactgacgggcaaaaactcaacgataatcagacaggcgacacaaaacgccacgctgaaaacggcactccagttcggtcgggtgatggcatccgcgccgcggttttcggcaataaattcactcatggtgttacccgtggcatgtttcaggggaaaagcgctccactttaacatactaatgtgactcgcatttaacgtttttgcaacttttacggtgttgctactgctggagttaagatcgaaacggaacagggcaaagattaccggatgcggcgtgaacgtcttatccacccgacaggtcaggcgcggtctgtaggctgataagacgaaacggtttcaatgcaaccagtgaacgccctcggcaggctgaaagaacgcgttatagcgcatctgaaaagcattaatatcctgcatttcaggttcggtttcgcgcagaaaacctagcgccagcctgacctgagcgtcggtaatcggcgcggcgaggcgagctttttgtaaaatccgatgccattgcagcaggttctgttcgctaccatcgacaatgacaatttgccagatgagcaacacctgcgcggcgttttgcaggtggctctcatccggacgatgcaaataacgtaaaaattcgtcaccagcactctttcccatttgatcgaccatgctctccacgggtacgacatcgatgttcagccgatcgctgagacggcgaatcgcttttctggccccggatgtcagcacccgaaaaccaaccacaaacactaccgccagcgtggcgagcattatccagatcatgagttctcctgcgtaatcagaactcatgatatctggaaaccctcgccagttattaatccaccagaataatcttcagtgcaaacagagctgcgaccaccaccacacacaggttcagatcgcgccagcgcccggtgcatactttcatgatgcagtagctcataaagccgagtgcaatcccttcggtgatgctgaaagtaaagggcatcatcaccgtggtaataaacgcaggcacgctttcggtaaaatcatcccagttaacgcgcgccaggctgctagtcatcagcacgccaacaaagattaacgctccggcggttgcgtaaggaggaactatcgccaccagcggactgaagaacataaccaacaggaacataacgccaaccacaaccgcagtcagccccgtgcggccaccgactgccacaccagaagtactttcaatataggcagtaacagagctggtgccgataaacgcacccgccacgctactgacgctatcaacatacagcgccttattcatattggggaatttaccgttaccatctattaagcccgctttatcagttacaccaattaatgttccactactatcaaataggttgatcagcataaaggagaaaatgataccggcgagttcaagtgttaacgcgccgctcaaatctacttcaccaatgacgccgctaatatcaggcggaatggaatagacgccgctaaaatgaacatcaccgaaaaataatccacagcaagacgtcaccacaatagaaaccagcaccgcggcatgaaaatgacgactactcaacacggttataataaaaaaccctaaaatacctaacaacacgccgtgagaacttaaatcgccaatcatcaccagcgtgtctttattggcgacaataacgccagtattttttaatcccattaaggcgataaataatccaattccgctggtgataccaatacgtaaacttaagggaatgttggagatcatccagtaccggatacgaaacagcgtgagcaaaaatagtccaactgcgccccagaatattgcgcccatcccggtctgccaggagatgcccatcgcccccacgaccacgaaggcaaagaaggcgttcagccccattgccggagccagcgccacgggtaagttagcaaatatccccatcgcaatactgccgataccggcaatcaaacaggtggtaacaaacaccactttcgggtccatttgtgccgcgccgaggatttgcgggttcacaaaaacgatgtacaccatggttaaaaaagtggtcatccccgcaatcaattctgtgcggacggtggtcccatgctgaggtagtttaaataatcggctaagcgtcccactttcattactcacgtaatcggtattgtcattattcatttttttgtccattggaggagatttaatcccttgcttttgtaaaacaaatgacaacaacggttcagtgataattatcacatttcaattgcacattaatggatattctttaataatctcgcgacgtttctttatgataaataataatcaaattgataaaatcaaaatgagaaaaatatgaataattctattaaccataaatttcatcacattagccgggctgaataccaggaattgttagccgtttcccgtggcgacgctgttgccgattatattattgataatgtctctattctcgacctgatcaatggcggagaaatttccggcccaattgtgattaaaggacgttacattgccggtgttggcgcagaatacactgatgctccggctttgcagcggattgatgctcgcggcgcaacggcggtgccagggtttattgatgctcacctgcatattgaatccagcatgatgacgccggtcacttttgaaaccgctaccctgccgcgcggcctgacgaccgttatttgcgaccctcatgaaatcgtcaacgtgatgggcgaagccggattcgcctggtttgcccgctgtgccgaacaggcaaggcaaaaccagtacttacaggtcagctcttgcgtacccgccctggaaggctgcgatgttaacggtgccagttttacccttgaacagatgctcgcctggcgggaccatccgcaggttaccggccttgcagaaatgatggactaccctggcgtaattagcgggcagaatgcgctgctcgataaactggatgcatttcgccacctgacgctggacggtcactgcccgggtttgggtggtaaagaacttaacgcctatattactgcgggtattgaaaactgccacgaaagttatcagctggaagaaggacgccggaaattacaactcggcatgagcttgatgatccgcgaagggtccgctgcccgcaatctcaacgcgctggcaccgttgatcaacgaatttaacagcccgcaatgcatgctctgtaccgatgaccgtaacccgtgggagatcgcccatgaaggacacatcgatgccttaattcgccgcctgatcgaacaacacaatgtgccgctgcatgtggcatatcgcgtcgccagctggagcacggcgcgccactttggtctgaatcacctcggcttactggcacccggcaagcaggccgatatcgtcctgttgagcgatgcgcgtaaggtcacggtgcagcaggtactggtgaaaggcgagccgattgatgcgcaaaccttacaggcggaagagagcgcgagactggcacaatccgctccgccatatggcaacaccattgcccgccagccagtttccgccagcgactttgccctgcaatttacgcccggaaaacgctatcgggtcattgacgtcatccataacgaattgattacgcactcccactccagcgtctacagcgaaaatggttttgatcgcgatgatgtgagctttattgccgtacttgagcgttacgggcaacggctggctccggcttgtggtttgcttggcggctttggactgaatgaaggtgcgctggctgcgacggtcagccatgacagccataatattgtggtgatcggtcgcagtgccgaagagatggcgctggcggtcaatcaggtgattcaggatggcggcgggctgtgcgtggtacgtaacggccaggtacaaagtcatctgccgttacccattgccgggctgatgagcaccgacacggcgcagagcctggcggaacaaattgacgccttgaaagccgccgcccgtgaatgcggtccgttacccgatgagccgtttattcagatggcgtttctttctctgccagtgatccccgcgctaaaactaaccagtcaggggctatttgatggcgagaagtttgccttcactacgctggaagtcacggaataataaaaaaagcccggcgtcatgccgggcaaaagtcaccagttacgtttatgccactgtcaactgctgaatttttttctcgcggcggattttgcgttcttccattaccgccactatcgccatcaggcagatacaaccaatcgcggcgatatccagcgcggcgaaggtgcctgcccagccggtaaggccgaataccggcgtcccatcggcaatcattcccagacctaacttggcaaagctgtcaccaatcaggtaagcaaaggtgcctttaataccatcggcagcgccaatcgcttttttaggtacaaagccaacagcagccacaccaatcaacaattgcgggccaaagaccaggaaacccaacgcaaagagagaagccagatagatatattcgttactggcatgttgatacacaccgagcgtggcgataatcagcgccagcgcgatgcaggccaccaggccacggcgaccgttcgccaggtcagagagccagccccacagcagcgtaccgaccagcgcaccagcttcaaacagcgtaaagccctgaatcgccaccgctttagagagtttcagttcctggaacgcgtatacggtactccactggtcgataccaatacgtaccacatagaggaaaatgttggcgaagcacagcagccagatcactttgtttttcagcacatactcaacaaagatctgccacttggtcatatcggtagattctgtctctttgtcctcttcgctgatctcctcgccgaacagttcttcagctttgccgaggccataagattccggggagtcgctgccgtaacgcaggccgataaaaccgacaatcagcgcgataatgctcgggaagataaacatgccgatgacatggccatcgaacaggtaatttgccccgaacagcgccacacctgctgcgcctgcaccgccaaggttgtgagaaatattccagaaaccgaggaatgtcccgcgtttacgacgcggcgtccatttggtgatggtggagtaactgcagctaccgccggtactctggaaaaagccgcttaaggcgtagaaggcaatcatcaggaacaggctaacgctgccgctgcccatactggcactgaagcccagcatacaaatagcagagaggatcagcatgaacggcaggaattgtttggtgtttttgccgtcggcgtagtaggaaaccagcgttttacccacgccataagtgatggagaaacccaggccgatcatccccagctgcgtcatgctcaacccgtaggtgctaatcatatcgttctgcgcgatgttaaagttcttgcgaatcaggtacatcgtcaggtagccgataaagaccaccaggtaggattgcatgaacggtttgaaccacattttgcgccgcacttcgagcggaaggtccagggtcggcttgcgaacctggtttaagaaagccagcatgggttactcctgaaatgaatacctgcgtgaggcatgcattgtaaaaatcagcagcaaatcaggcctgagatagcgtccaggcaaaacctggaaaatttcttagttttgccggatatgaagtgaaaaggtgagatgcatcacgcttcgcgcggtgtctgggcgttcaaaaagggcagtaacagcagtgcggaaatcccggcggcgatagagataaccacaaaaaatccgctccagtgccaggtatcgagtactttcgccagcggccaaccagcaaggctcgcccccagataagcaaacaagccgacaaaccccgtcgccgcccctgccgcctctttgtgggaacactctgccgccgccataccgattaacatctgtgggccaaagacaaaaaaaccaatggtgaagaagcaggttgcctgcatcacgtagctggcaaatggcatcagccacagggagccgacactaagcaaaattccggcggcgaaaatcaaattcatcggccctcggttgccgttaaacaatttgtcgctgccccaaccggctaccagcgcaccgataaatccgcccagttcaaacatcgtcactgccgtattcgccgtgaccagatcgacgcccagtgtctcggacatatacaaattgccccagtcgttgatcgccgcccggaccacatagaccagcacatagcaaaagctaagcagccagatatacggattcagcaacacatatttggtgaggatctctttacgcgtcaaccctgccccttcttgttgttgagcaatttccagcgcgtcgtgtcgccattcaccgaccgccggtaaacctaacgcctgcgggcgatcgcgtagccgccagcagagaaaaatccccacgactatcgccatacaaccagcaatcatcatcccggcacgccagccgtaatgcagcgcagccgctgccatcacaatgggaatgagtgcgccgccgacgttatgcgccgtgttccataatgcccaccaaccgccgcgctcggtacgactataccaggccgttaacagacgcgcacacaccggactaccccagccctggaaaaaggcgttcagcacccagagcacggcaaacgcccataggctcgtgctgaagccaaacagaatgttgataatgcccgtggcgataagccctatccccataaaataacgggcattactgcgatcgctgacaatgccggagacaaacttgctcacgccataggtaatgtaaaacagggtcgctaacaggccgatatcgctacggctgagcacgccgttagcaaggatttctggtacggcggcgttaaaacttttccgcgtgaagtaaaacagcgcgtaacccagccagatggtcagcagaatatgccgacgccagtagcgatagcgggcatcaatttcatatttatcagtcattaatggcgcatcggcaggcgctttcagaaacggcaacatcatcaaaccttagacatagcgttgaggtagagaaacgctgacacgcgtgccgtgcagacaggaaatgtgtaatgtgccacccagcgccgttacgcgctcgcgcattccggtgaggccaaaaccttgttgcccggaacccggcggcaaaccgctgccatcgtcttcaataaccagcatcaaccgttcatcctgctgccagccttgcagggtgaccgcgctggcatcagcatgtttcacaatgttgttcagcccttcctggcagacacgaaacagcgtcacgcgctggttttcgcttaacgcactttcatcgattcgccattcgagatggctgacaataccgcgcccttccagctccatttcccgcatcagactgcggatggcctgctccagggtgagatcatccaactggcgcggacgtaaccgacccaacaaacggcgcaccgcgtcgtaaacgcccaggcttagttgttcgatgagctgcccgctctgcttcacgctggcgttatctgccgccagccgctgaacaatgcccgcctgagtacgaatagcagtgatggtctgaccgatatcatcatgcagctcacgcgccacatcacggcgcacgctctcttcggtttccagcaaccgttcagccagatgctgattgcgcgccagttccttttgcaggctctggttaagttcacgcaaccgctggatgccagcgccaagcaacaaccctgtcagactttgcaccagcaggctgagcaataaatccaccggatgatcgcgccaggtttgactggcgatcagcgcgatggcgttcatcaacgtcgcaatcagcgccccttgccaaccatagtgccaggccagcgcgataatcggcagcgccagacagaatggcgtaaagcggctcagttcgtccggcaatcccaactggagccagagactgataacaaacagcagcaagtaccagaccagatgtcgcccgcgccagttgattggctgagaaaccagactcggaccgagcggcagccaggtgttattggcgagatagtgccagaacaccagacatatcggggccagcgtcaggccgccagttaaagtcagcaacagcgcattccagctctctttgccgtgccaaagccagggcaggctctgcaacaacgccgccgccgttaacgccgccccctgtaacagcaaggtgcgccagtcacgctgatggcgatagcggctgatcagcgctacgggcagtaacgtcagtaaactaccgatcatcaataacggaaaatgggttaaaccgaccgcctgcgttagccagtaaatcagcagccactccgcgcccagcaatacgggccagtatccgcgcgggcattgcagcattagccccagacgcagaccaaacggaaataacagcaccgccatatcagggcgctcaaccagatgcaggctgatactccacaggcaaaaccatgcggcagagaagataaaaaagcaggcaataacggtaattaagcgggagaacaacgtcttcatcaccagccatcaaacatgcggcgcgccagctctacgtcgttactgacgcccagtttttccatcagattggcgcgatggacgtgtaccgttttcggactcaagcccagttcggcggcaatctctttcaccgccattccttgcgccagtttttccgccacctggcgttcacgtttggttagcgggtcctgacgaccggatgccagtttaatggcaatatccggcgtcagataacagccgcccgtggcaaccgtatgcaccgcagcaatgagttcatccgggctacagcgtttggaaagaaagccgcgtgcccccgcgttaagcgcctgctcaaccagcgcaggactgtcgtgaacggagagcataatcgtcgccatacctttcggcagctggcttagcagctccagaccggagatatcgggcatggagatatcgcaaatacacacctgcacaccgcgccccggcagccccgccagcgcctcgcgcccgctaccaaactcggcaactacctgcaaatcaggttccagccccagcagctgcgcaaagccggagcggacgatgaggtgatcgtctataagggcaacggtgatcatggtcttgtcctggcgggtaaaaaaaatacgcgcttaccttaacgataagcgcgatgttgttcaagccttgagcggttactgaaaaaacaccgcgatcttgttaaacatcgtcggatcggactgattacgctgcactttcacgacatcttccagcttatcgatttggcttatcatctgctccagacgctggtcgtcattgaccagtagccagatatggcttttgtcgctgtcctgaatcggcagacaaagaatgccttcaacgttaaaagcgcggcgggcaaaaaggccacaaacgtgggtcattacgcccggatggttgcgaacggtgagctccagaattacgttgtcatgagttgtgttttgcatggcttattcccccaccatttcagtattcgccgcacctggcggcaccatcgggtaaactttttcttcggcatcaatgcgcacatggatcagcgccgggccagggcgattgatgatttcctgcaaactagcctgcggatcggcttcgttattcaaatcacaggtttcgaggccgaatccggcggcaatctgcataaagttgattttgcccggataggtggcggcaaaaacgccttgctcgtagaacagactctgttgctgatgcaccagccccagcgcttcgttgttcatcagaatgattttgacatccagctgattttcactggcggtcgccatctcctgaatattcatcatcaggctgccgtcgccggagaaacacaacactttgcgatccgggttcgccagcgcagcgccaatcgccgcaggcaggccaaaacccatcgtgcccagcccaccggaggtcagccactggcgtgggcgattgagcggataagcttgcgcggtccacatctgatgctgaccaacgtcggtggtgataattgcattgtcatcgacacaggcggcaacggcgttgatcaggccgtaatggcttaacggatcgcacgctttcgggattggacacggaaactcacgctgcaaatccgctaccaactggtgccactctgcacgcggttgcgcttccaccagcgggatcaactgcgccagcacgtcatcaacatccgcctgaatcgccacgtgcggctgcttgattttacccagctctgcacggtcgatatcgacatgaatgattttggcattcggacagaactgctcggttttgccaatcgcccggtcatcaaaacgcgcaccgagcactatcaacaaatccgcctcctgcaaaatatagttggtgctgcgcacgccgtgcatccccagcatacccaggctcaacggatgcgcttttggcaacatgcccagcgccattaaagtcatggtggtaggcagttgcgctttctccgccagttcacgcacccgtgcgggcgcattgatcacaccgccgcccagataaagcaccgggcgtttggcagcgttaatcatcgccgctgcgtcacgaatgctttcttcgctaaaggcgggggcggcggctttttctgccatagcgggctgtgtttcaatctcaaaaactgccgtttgcacatccttaggaatgtctatccacaccgggcctgggcggccactttgcgcaatgcggaaggcatcgctcatgacctgcgggagttcttcgatatgtctgaccagatagttgtgtttggtgatggggatagagatgccgtaggtgtccacttcctggaaggcgtcggtgccgatcatgctggcgggaacctgaccagtgatgcaaatcagcgggatggagtccagccgcgcatcggcaatggcggtcaccaggttagtcgcacccggtccgctacaggccatacagaccgccggtttaccgtcggtgcgcgccattccctgagcgataaagcccgcgccctgttcatgacgggccagaatatggcggatttgcgtgctttggcttaaggcatcgtaaacaggcaggatagaaccgcccggaatgcctgtcacaatcttaatgccctgctgttccaggaaatgaacgataaattctgcgccggtaaagcgcttacgcgtgcttgttgtgccgctacttgccatgctccagtccttttcttctgggccgactttccgggaggtgcttaaacgaaaaaccccgcccggtttgcgccggcggggttttggaatcgtgtgttgttccagtccttacggcgcattgccgacgaccaccaccacacgcacgacgaccactgcggcggatggcgcagttggtagtagttttgcgttgagcatggaagtagtcattggggaccttgttggttttgtgtttaacaatatttatacaagcacagctttacaggggagacaatggaaaatttttcagcaagggaaaattgaggggttgatcacgttttgtactgaattgcagataacaaaaaaccccgccggagcgaggtttcgtcagtcgcctgcggctggtaaccgcaaagcacactgtattatgtcaacactgaaagtatacgtgttccgcgcagaacgcgcaatttcggcacgaattttgacgtatttagtgcatagttgagtatcgatcacagtttgcgttttgtccaaatattactgtttatttatacagtaaacttctataatatcactgtacgcaatgtgttatgcgggggccgcatcgttacccggcgcactaagttctggctgaaacgggtggtgccgtcagcgccttaaccccgcgtgagcacactgtgttatgtcaacaagcacaacgtttctccttgagataccgcgtgcacaacagctggcaacaggcagcggaaaggtacgtcagctggcagtgctcctgaaccacaggagacgcgtatgaacctggtggatatcgccattcttatcctcaaactcattgttgcagcactgcaactgcttgatgctgttctgaaatacctgaagtaattcagattcaagtcgcaccaaaggggagcgggaaaccgctccccttttatatttagcgtgcgggttggtgtcggatgcgatgctgacgcatcttatccgccctaccatctctcccggcaacatttattgccgcttttgtttacatattctgccgctaaacaattccccattcctggcgtatatctggctaacattcatcaatgtgatagattcctctcccgcatttatgggaatgcgtagtgacttattctaattatttttataaaagcatccgtgataatgaaaaggcaaagaaacgtcaatttgttattgatgttggtattactcgtggccgtcggtcagatggcgcaaaccatttatattccagctattgccgatatggcgcgcgatctcaacgtccgtgaaggggcggtgcagagcgtaatgggcgcttatctgctgacttacggtgtcagtcagctgttttatggcccgatttccgaccgcgtgggccgccgaccggtgatcctcgtcggaatgtccatttttatgctggcaacgctggtcgcggtcacgacctccagtttgacggtgttgattgccgccagcgcgatgcaggggatgggcaccggcgttggcggcgtaatggcgcgtactttaccgcgagatttatatgaacggacacagttgcgccatgctaacagcctgttaaacatggggattctcgtcagtccgttgctcgcaccgctaatcggcggtctgctggatacgatgtggaactggcgcgcctgttatctctttttgttggttctttgtgctggtgtgaccttcagtatggcccgctggatgccggaaacgcgtccggtcgatgcaccgcgcacgcgcctgcttaccagttataaaacgcttttcggtaacagcggttttaactgttatttgctgatgctgattggcggtctggccgggattgccgcctttgaagcctgctccggcgtgctgatgggcgcggtgttagggctgagcagtatgacggtcagtattttgtttattctgccgattccggcagcgttttttggcgcatggtttgccggacgtcccaataaacgcttctccacgttaatgtggcagagcgttatctgctgcctgctggctggcttgctgatgtggatccccgactggtttggcgtgatgaatgtctggacgctgctcgttcccgccgcgctgttctttttcggtgccgggatgctgtttccgctggcgaccagcggcgcgatggagccgttccccttcctggcgggcacggctggcgcgctggtcggcggtctgcaaaacattggttccggcgtgctggcgagcctctctgcgatgttgccgcaaaccggtcagggcagcctggggttgttgatgaccttaatgggattgttgatcgtgctgtgctggctgccgctggcgacgcggatgagccatcaggggcagcccgtttaagcgcacgtcaccgcagcatcgtcatcagctccatgggagaacgatgctgctttatcagatcacgcatcacccgcatatgcggtgcggagtaagaataaaacgcctgatagcccgcacaaagcacgctgtctggcgtctcctgccgagcgtgcgggcacaggcgatgccagtcgcacgcctggcagtcacagcgcggttgcgggttttcgctgccacaccatttttgtaaggtggcgtcaaaaagctcaatgctgatacgactgatatctgcccgcacccaacactcgaacagggcaattaaaaatttcccccacagctctgctgtcacgctagcggccgtcagatcgccccggtcatcaaattcaagatagggaatgagctgtacggagcggatgccccgctgtttgaaattgtgataaaaatcggcaggttgcagagcatccttgtactctacaaccagtttatgcctgtcctcttcagcatcaatgacctgacttcctgtcatgcgactctctcaataaatacgataagttgatgtatatgcgttacagcaaacagtattgcgagagataacaccgcgagggagatcaaaaatttgtcacggactacgtgaaattgggaaaaatcgctattcgtgacatccattaaattgcgattacgggtgtagtgccagaggatcagcgccacgatggcgagaatgccaatgctaatccagaataacatgcccgcctggtgccagttgtgtttgatagccaacgccatcaacgcgccgtagcccagcatggtacgaaaccacgccagacttgtgcgctccggctgcagtcctgggtcggcaatgcgtctggctttgcggctatccggcatacaacaccagtcccataacgttaattatccggcatacaacaccagtcccataacgatcaccgccacgaccatcaatattaagctaatgattaataagctgttggtgtagggcaggtcctctttcagacgcatcgctttttcattgcgtaaccagcgcaagtagccatacatcgctaacccgccggaaaacagacacaacaacaacgccagcagttcgcgaatgacgggcgtggcgaaatctggcgcaagttgatcaagcccaacccccgccgccagaaatcctagtgcagtacggatccacgccagaaaagtacgctcattagccaggctgaagcggtaatcaggcgcttctccgaggcgggaaattttcattgttgctcctttgcaatttcactaacgctctacctttagcggtttttttaagaatttcgtccgcccgtttcctgatatgcttttgccatccgctacaaggaggtcagatgggtatcatagctcaaaataaaatcagtagtttgggcatgctgttcggtgccatcgctttaatgatggggattatccactttagtttcggccctttctccgcaccaccgccaacgtttgaaagcatcgtggcggacaaaacggctgaaattaaaagaggtcttctcgccggaataaaaggcgaaaaaattaccaccgtggagaaaaaagaggacgtagatgtcgataaaatcctcaatcaaagcggtatcgcactggccattgctgcgctactttgcgcatttattggcggtatgcgtaaggaaaatcgctggggcattcgcggcgcgctggtttttggcggcgggacgctggctttccataccttgctttttggtatcggcatcgtgtgcagcattttgctgatattccttatcttttccttcctgaccggcggtagtctggtttaagcagcctgaataatgcccgccgggtgatcatcagcgggcattatcgtcagaacttctgttttttctcctccaccttcaccccttgtgtcggtaggccggtgtcatagtcgcgtacaactgggctatagccatcttgtggacgtggacgaaacgcccccatccagcgcggccgtgcatctttacgccacggacgcagactccattggtaactgcggaacggatcgcgaattttgtccatgtaatccaataaggcgtcatgcattttgctgcgaacgtctgcaaaacggatatcatcgatcaggttatgcatttcatttgggtcattacggcgatcgtaaagttcatcactggtgaagaggttgagtaccagtttaaagtcatccgtcacccagcaacgcaccggaataaaaccgccaaagctgtcatgctcaatctcgtagcggttaaattccaccatcacgccgcgtggctctttcacggcaaggatattttcccccggcagaatctctggtttttcaatatctgccagcgccatcattgtcggcagtaaatcgatatgactgactggcgtatcgacctgtcgccgctccccttgcgggctacggatgatcagcggaatgcgggtgatgtcgtcatacatcgccgcccctttactgatcagcttatgtgcgcccatcatttcgccgtgatcggaggtataaataacccacgtattttcacgttgctctggcgttaaggcattgatgacccgtccgatttggtcatcaacaaagtcattacaggcaaaatagagcggatggtgataaagcccgtcatcaccgactgggcttggcatcgcctgcgcccataagcggtgatgttccggtttgttagccaggtcatcctgtgctttctcgcccagctcgtagtaaaaatcagcgtatttctctaaatactccaccggacaggtgaacgggtgatgcggctcatcatagctaaccaccatcaggaaaggctcgtctgcgcgcgcaggctgttgcagaaaatccaccgcccgattgctgatacgatgcgcccaggtgaaggtttcgtcgatatggttcgcctgtaaatcttcgacgctgtttaggccattgcgccacaggctaatctctttttccgtcagttcgctaagatagttcgccccatcgaaccagtaatcagcgtcccactccggcggacactcgccagtgccgaaatagtcatgaccgtcgagatgccatttgccgatgtaacaggtgtgatagccggcatccttaaagtagcgccccatagtggagatgtttttgcctggcgcgacgttgttggtccacgggccggactggttagcgtagataccggtaaatagtccggcccgtgcaggcgtacaaaccggactacaggtgtaggcggaattaaagcgaataccttccgccgccagactatcaatattttgcgtattcagcggtttaccgctatagcaaccgaccatattggtggcctgggtatcggtcatgacgaacagaaaattggggcgtttcataggctatccttcccgtcgggagtaaaggttacggctgggtcgtgacgatgccgccagctgtcaaaaatcaggtagacaatcactacggcggcaatgaaataactgatcatcgctaaccagcgcgtaccgtagccgccgaattcagccagcccggcatagacgccaatcatcgcgaacaggatgccaatactcgcgatcttgacgtttttccacggtttcatgtccaccgcaaacgcatctttgaaggtgaacggcgtggcgcgcggtttgataaaaccgatcaccagcatcacgaccacgttgatgcagaacgtacaggccagcacatagaggaaatggaagtcgaacttcaccagatagttgatggtgatgtagctgattatgccaatccccatcgctacttttgccgccagcgccgggatgcgcgggaagaaaaagcccataatgatgatggtaaccagcggcacgttgtaaatgccgttgagctgtttcatccagctatacagcccctgcggcgcgttggcgatccacggcgcgaccagcacgctaacgatagcgataaagaaaccaaatttgcgcccgacggtgaccagctgctgcggctcggcattctggttaatgatgcgacggtaaatacccatactgaataacgtactggcgctattcagaaagccgttgaaggtactgatcaccgcaccaaataacaccgcgccgaagaaacccaccattggcactggcagaacgttattgaccagcgtcgggtaggccatgtcggctttcggtaaatcctgatacagatgaaacgcaatcaaccctggcagcaccagtaccagcgggtcgagcattttcagcaccgccgttaacagcgcccccttttgcccttccgccaggcttttactcgccagcgtgcgttgcacgatgccctgatttgtacaccagtaaaaggtgttcaccagaatcaaaccggtaaatgccgcgccaatcggcaagggatcggtcgggccaccgatactgtttaatttctcggcgtgaacggtggtgagttgctcaatgccctgcataaagctgcccttgcccatcgcgattaggccaaataccggcaccatcaacccgccgataaccagcccaataccgttgatggagtccgccactgccattgcgcgcagtccgccgatcaccgcatacaaaattcccgccagaccaagcaaaattaccagtagccagatagccgcaccgtgagaaatctgtaggctttccccgacgtgaaacaggctgttgagcgccaacgcgccggagtagagaacaatcggcagaaagcagacgccggtggcaattaggaagcagaagtcgatgataatacgcgtcgttttatcataacgttcctccagaaaatcggggatggtggcaatgccgcgcttcagatagcgcggtaaaaagattagcgcgaggaagatcagcgtcaccgcactagtcacttcccagcccatcacgctcatgccgcttttgtaggcctgcccggaaaggccgaccagttgttccgtggaaaggttggttagcattaagctagcggcaataaccggcgcttttagactacgtccggcaagaaaatagccttgttggcttccggtatctgttttgcggaccttccaccaggtgatcaccgccaccagcagcgtaaaaccgacaaaactcaagatttgtaagctattcatctcatagcccttatttatgtttatgtcccggacgcatgaatatagggagaggtaaaatgcgtcgggtcaggcagtcagattcttaaaatacaaacgtcgtatccctgaacggattgttttctgttaagttcaggttgtgagcataattcgccggagggatattaaaatgaatggaaaattgcaaagtagtgatgtaaaaaacgaaactccgtacaatattcccttattgattaacgaaaatgtgatctccagcggaatttctctgatcagcctctggcatacctacgccgacgagcattaccgggtgatctggccgcgggacaagaagaaaccgcttatcgccaacagttgggttgcggtgtataccgtacaaggatgtgggaaaattcttttaaagaatggcgaacaaataacactgcatggcaactgtattatattcttaaagccaatggatattcactcttatcactgtgaaggtttagtctgggaacagtactggatggaatttacccccaccagtatgatggatattcccgttggtcagcaaagcgttatttataatggcgaaatttataatcaggaactcaccgaagttgctgagttaataactagtccagaagcaataaaaaataatctggcagtcgcttttctgacgaaaattatttatcagtggatttgtcttatgtacgcagatggtaaaaaagatccacaacggcggcaaattgaaaaattaattgccactttacatgccagtctgcaacaacgctggagcgtagctgatatggctgccacgatcccctgtagcgaagcctggttgcgtcgtctgtttttacgctataccggcaagacgccgaaagaatattacctcgatgcgcgtctggatctggcgctaagcctattaaagcaacaaggaaacagcgttggcgaagtcgctgatacgctcaacttcttcgactcctttcatttcagcaaagcctttaaacataaatttggttatgcgccgagtgccgtgctaaagaatacggaccagcacccaacggatgccagtccacacaattaacgtaactctggccagtacgctttgttggcctccagcaactcatccagaatagctttggcgacgctggcgctcggtaccgttttgctcaacgtaatcgcctgccacaggtgctgataactacgctgttcccaggcgtccacgaccagtttttccaccgccacttgctgactcattaaccctttctgaaactgcgggatatcgcgctccaccagtggttcaggccgtagtagcgcacgcgcatctgtttgcgatcttgcagcccaacaatttgcgccatccggctttcaataccgattggcatgtcacagatgttgaggattttcgcattcgggcgcagacgacgcgtggcttctgcgacaatggctgccgggttggagtagttgagcatccaggcatttggactatatttttccatataatccaccagttccaggacgccgccaatggaacgcatgccgtacgctattccgccgggtccgcaagtttcctgaccaacaacgccgtggcgcagcgggattttttcatccagttcgcgcatcgggtatttgccgacgcggatgtgcgccatgacaaaatcaacgtcgctgaatgccacttcaggatcggtggtgtaactaaacgcaatgtccggcgctttttctttaaggatgactttacaggcttcggcaatcacttcctgccgcgcaccatcgttatcataaaatttcagtgcacgaagcgggaaacggtcctgattcgccaggagcatcaacacgatgcctggcgtaaaggtgcttccaccgcctgcgacaaccacactgaatttggtcattatactgcctccgtaatggcaacattttctgcactttgatgagaattaattaagctatcgagctgttcacgcagctgagatacatgcagaccaatgatcacctgaatggcatcgccactacggaagacgccgtgcgctcccagctttttaaagacttcgtcatccagcgtttgactcatgtcatgcagtgcaatacgtaaacgcgtcgcgcaattgttaatgctggagatattgccgaccccgcccagggcttgcaggataccggcagcctgatccagctcttttttttggctctgccgcggtggtttggcctcggctggctttgtattcggctttactgtagagtttcacttccgcatcttcacgtcccggcgtgcacatgttgaactgcagaatcagtgtgcggaaaaccacgaagtacagcagggtaaagcacaacccaatggcgatttgggtcagcatcatatccgcgtggttgctgaacatcgggatccagttttgcggtaaaacttagtcaatcagacctccgcccatgttgcccaccacaccaaagagatacattacggtgctcatactggccgccagcacggcgtgtaccgcaaacagcaacggactaatgaacaggaaggtaaattccagcggttcggtaattcccaccagcatggcggttaaggttgcgggaatcagcaagcccgccacttttacccgattttccggtgcggcagtgaagtacatcgctaaagaaatgcccacggcaccaaagattttactgttaccgtgcagggcaaaaccgccttccgggaacaagcttttcagcggctcggcgctcaaactgaactcttgcagatgctgcgcccagtacatctgaatgccgccttcaacagctgccggaccaaagataaactgtccgtagatgaagtggtgtaaaccggttgggatcagaatacgttcgaggaaggtgtaaacccagaccccaagtgcacccgcgctacgcaggaacgcttgcagagattcaatccccatttgtacttttggccagccgagcaacgtcagccaggcacaggggatcatcaccaggaaggcgataatcaccacataagacgtcccctggaaaatgccgagaaaaaccggcagttttttatcgaacagacggttatgcagcgccgtcacaatgccggaaatgataattgcgccgataatgctggtatcgagggttttaatcccggccatcattgtcagaccgctacctgccaccgcgtcctgagtgaaatcgacgccgaagtagcttccccaggtcattcccatcgcgttgatgaaatagttccaggtcaggaaactcaccatcaccgccagacaagcacgcccctgcgcttgcttagcaaggccaatgggtaaaccgacagcaaaaatcagcggcatattacggaataccgtccaaccgccctcttcaataatgtgtacgatttgcgcgaataaactgttcggatcggtcagactttccccgacaaacatcgggttttgcagcaagatggcaagacccaccacaatcccggcgaagggaaacagcagcactggcgtgaacatcgcgccgccaaagcgttgaatttgactgagcatttccacatcctcttttctcaattctgtaagtaggaagcctgattggttatgcggcaggcctggagcgaggataggaagatgcgatcggcagaacatgacgacccaatgggattcgtgatcgctttcatgcttttcgttgggcggtagagatctacgttttcgcgaaaaagtagacctctgtgagcacaggtacacagcatcgaacacatctttaaaaaaaagatgttttttcaatcgattaagcagaacttgtgtgcgcattacccgggcttgcaggcaaaaaagagatctagagatgatctacaaaagcattgcggagcggttaagaattcgacttaactccgcagatttcacgctaaacagccttcttcccggtgaaaaaaagctggcggaagagtttgcggtaagccggatgaccatccgtaaagccattgacctgctggtagcgtgggggctggtggtccgccgccacggtagtggcacttacctggtgcgcaaagatgtactgcatcaaaccgccagtctgaccgggctggtggaggtgttaaaacggcagggaaaaacggtcaccagccaggtgctgatttttgaaatcatgcctgcgcctccggccattgccagccagttacggattcaaatcaacgagcagatctacttctcccgtcgcgttcgttttgtggaagggaaaccgctgatgctggaagacagctatatgccggtaaaactgttccgtaatcttagcctgcaacatctggaagggagcaagtttgaatatattgaacaagagtgcgggattttgattggcggtaattatgaaagcctgacgccagtgctcgccgatagactgctggcgcggcaaatgaaggtagcggaacacacgccactgctgcggatcaccagcttgagttatagcgagagcggggagtttttgaattatagtgtgatgttcagaaatgccagcgaataccaggtggagtaccatttacggcgactccacccggaaaagagttaaccgatactccagaagagcaccgccagtaattggggggtgataatgcgcaggaacattaccaacggatagacagtggcgtaagagagcgccgccgcaccgctggttggatgaagattattagcaaacgccagcgccggaggatcggtcatggaacctgccagcatcccgcacatggtcaggtaattcattttggctaacatccgcgccagaatgccaacagtaatcagcggaacggcggtgatcagggcaccataaccaatccagcttagcccttcgccattgaccagggtattcacaaaatccccaccagatttcagaccaacgacgctgaggaacagcacgatccccagctcccgcagcgcgaggttggcgcttggcggcataaaccagtacagcttgccgatactgccgatacgcccgaggatcaacgccataatcagcggtccgcccgccagccccagtttcaacgcggccgggaatcctggcacaaagacgggaatagaacctaacaatacgcctagcccgatgccaataaacactggcagcatctgaacctgttgcagtttttgctgcgcattccccagcacattggcaacggcatcaattgcggacggacgccccaccagattgaggatatcgccgaactgcaggctgatatcgccactggcgaccagttcgaccccggcacggttcaggcggctgataacaacgtcatagcgttctttaaagtgcaggtcgcgaatacgttttccgagcacgttttcattggtgaccaccacacgctcgacgcgcaaatcagtgcctttcgtggacaggctagtatcgacctcctgaccaatcaccagttgcgcattatgtaaatccgctggctgacccaccagatgcagcaaatcgcccagttggataatggtatctgggctaggaacttttagggtttcttcgcgtttcagacggctgcagataattttgtcgccgttgagaatcggtacatctttaatggctaaatcatgcaggttagggttctcaacgcgaatattgatagtcttgatcagcgcgccgccattggtgcgactagactcgtgctgctgagcttctgtctcgacattgacgcggaaaataacccgcaacatccacatggtgaacaaaatcccgcaaatgccgaatggatacgccatcgcgtaactcatccccatctgatcgaccatttccattggtgtacccaggtcgcgcaaaatctgctgccctgcccccagcgctggcgtattggtaaccgcaccggagaaaatccccagcactaccggcagtggaatatcaaacagtttatgcaggatggcggtaaccagaccaccgatgatgacgatcagaacagcaaacaggttgaggcgtaatccggagacgcgcaaactggcaaagaagcccggccctacctgaatcccgatagtataaacgaacaggatcaggccaaattcctgaataacatgcagcatatcgctacttaatgtcatccccgcctgagaaacaaaatggccgacgatgatcccaccaaacagcacgccgccaatacctaatcctatgccgcgaaatttgacgttgccgataaacaaaccgacgactgccaccaaagccagaatactgaccgttaatgctatatcactcatcgtccatttctcttgagataacattttaattgctacggattatggctgaatcggtgaagcagatttgccttatagcgcacattatcacgggaaagaacgtgccgaaatatcttaaacagtcgaaatttaacgcattgttgagtaagtaagacaaaaaaagccccaccagaatggcggggcaaagagaatagctagttagctatttaacgcgggacgttcgctgatagcgatacgctgcgctgcgatgggttcaggctcattacgaattaaatcaatatgcagtaaaccgtttacgaaggttgcgccagagacttccatattttcagccagcgtaaagctcaggctaaatggctgattcataagcccttgatgcagccattttttctcttcttttggctgctccggcgtgccttttacgctcaggcgcgtaccttccagttgaatctctaaatcttcctgacggaaacctgccagcgcaagggtaatgcggtagtggttatcgtcgcttttctcaatgttgtacggcgggaagctctggctttcaccggcgttttgcagtgcgttggccagtttgtcaaaaccgatccattgacgcatcagtggggataaatcgaagttacgcatagtcatttctccttctaagaagcgagtaagtacctgcaaatccgaagattcgcatatgctccctgacggcgagcatggagatgtcaggccgcgccaggcggccttagggaattagttgatttcgatacggcgcggttttttcgcttccggaatcacgcgttcgagatcgatatacagcaaaccatttaccaggttagcaccacgaacatgaatgttctcagctaactggaatttgcgttcaaagttgcgttcagcgatgccctggtacagataggtgcgctctttttgttcgtcggcgtgagcacctttcaccaccagcagattatcctgggcggtaatttccagttcgctctcagcaaaaccagccacagcgatagcaatgcggtaatggttttcgtctaccagttcaacgttatacggagggtagccgccattactctggctctggttgttttctaagtggttaaacaaacggtcaaatccaatagcagaacggtaaagcggggataaatcaaagttacgcataatcaatagctcctgaaatcagcgagaatgtaagaccttccacaatggacaggtcaggtagccagaacacccatcaggcgcgtcctcatcggctacgatgtaaaaatgggtctggaaatgaacttttcaagccttatcagcggacttttttttgcagtttatggtctattgcatagactgagggggcagcacgaaacgttaaagtgcgatagccgccacagtgcgacgtaatgatgatgttattttcagcaagggatcgctataactcatcaggccaacacccacgatcaacagatgaatttattatgataagaaatgtgttgttagcgttcatgatatgcagcggaatgacattactcggaggatgctccagcgtgatgtcccataccggagggaaagaaggaacgtatcccggcacccgcgccagcgcaaccatgattggcgacgatgaaaccaactggggcactaagagcctggcgattctcgatatgccgtttaccgctgtgatggacacgcttttactgccgtgggatgtgttccgcaaagacagcagcgtgcgcagccgcgttgaaaaaagcgaagccaacgcgcaagccaccaatgcggttattccaccggccagaatgcctgataactgatttagcgatcagtttcggtgatccacagctggccgccttccatccacgccagccactgaccatccgggctgaagaccacggcgtccgcagaaggactattggcgtggtgttcggttaaatactcaacctcgccgctttgcgcatgggcacaagcaattcgattatccagcacaaagcccaaccattctccactcggatgccagttaaatgcagactgaatatccgttttgttatgggttaactggcgcggctcgccgccctgtgggctgataagccacagttgcacaatgccgttatcatctcgcattaaaaacgcgatttgtgtaccctgcggattacagcgcacccagtggcgcgggacgttgactaaccccggataagcccgatggtgggtaaaggttaaacgtcgctgcacgacgccacgcggtggcgcgggcagggttgtttccgttccgcttaacggcgcatcacctgccgctttccagccagcttcatcttgcggtaactcaacgataaacagctccggcactttctcgccctttgggctaagtgtgtcgccaataaatgccagcgcgtgatttcctacccatccttcttcataagcacgattgatttcatcactgccaggctgtggcgtgggcgtggttttgctcaccagcacgcaccagtggctaccgctgtattcacgcggatgctgcttttgtacgttgaccgggccaaacggcgcagcaacaccgacgtttcgcaaatccagcgccggatcgagttcatgcattacatggtcgttataggtaaagctcaccctttcaccgttcgggctaaagacatgcacatggctgccgccgcgcagcactcctggcgtatacggcgcggtaatatccatcgcatcaaggttactcatcttgccgccttcaacaatcactccgcgccgatgatggaagtcgtaatgccatgtttcatcaggattttccgggccgtggatgaaaacatatttctcactcttcggatgaacggtcaccacgccgacgtgtgcgccctgactcgcgcgatagataacctcgacctcgccggtatggatattcacacgctcaatggtctcgccggtaaagctcgcgccagaaggacgcacgtcaaataccagccactggctgtcgggcgtccaggtattggtattggtgagcaggtgattacggggagcaaaggttatctgtttcatggcgcggtcctgatacaaaacgggtcccgccatcatacttcacaaggacttcactttcagacaatagtcttttgccatcgtgatgaatgtgagtgaaaagatggaacatttcgacgtggcgattattggcctcggcccggcaggaagcgcgttggcacgaaagttagcaggcaaaatgcaggtgatcgcgctggataaaaagcaccagtgtggtactgaaggtttcagcaaaccctgcggcggtctgctggcaccggacgcgcagcgatcttttattcgcgatgggctgacgcttcctgtcgatgtgatcgctaatccgcagattttcagcgtcaaaaccgtcgacgtcgccgcaagcctcacgcgtaactaccagcgaagctatatcaatattaatcgccatgctttcgacttgtggatgaaaagcctgatccccgccagcgttgaggtttatcacgacagcctgtgccgaaaaatctggcgtgaggatgataaatggcatgtcatttttcgtgcagacggctgggagcaacatattaccgcccgctatctggtcggtgccgatggcgcaaacagcatggtgcggcgacatctctacccggatcatcaaatccgtaaatatgtcgctatccagcagtggttcgcggagaaacatccggtgccgttctactcctgcatctttgataatagcataactaactgttatagttggagtatcagcaaagacggttattttatctttggcggtgcctatccaatgaaagacggtcagacgcgtttcacgacgctgaaagagaaaatgagcgcctttcagttccagtttggtaagacggtgaaaagcgaaaaatgcacggtgctgtttcccagccgctggcaggattttgtctgcggtaaggacaacgcctttctgattggtgaagcggcgggatttatcagcgccagcagcctggaggggattagctatgcgctggatagcacagacattctgcgtagcgtgttactgaagcagccagagaagctcaataccgcttactggcgcgccacccgcaaactgcgtttaaaactcttcggcaagatagtaaaaagccgatgcctgaccgcaccggctttaagaaagtggattatgcgcagtggtgtggcacatattccacagttgaaggattaaccaacgcgcttcacatcgcccaccagcaggatataagagagcgcgccaatcaacgcgacggcggagatataaaccagtgcaggtgcgaaaccgtaaccctgcgccaggtaccccaccaccagcggaacggtgatgccgcccagaccaccggcgaagttaaacacgccgccggttaaaccaatcaggcgcatcggtgccagagaagaaaccaggctccaggtaatgctagcaaaaccgttaccgaagaatgccagcgccatcaggcacataatcatcatcggatcgttagtgtagttagcgcccataatgcaggtggagatcagcaagccgcagataatcggcgttttacgcgcaaagcccagactaaagcccttacgtaccagcagatccgctacccagccagagagcaggacgccgacaaacgccgcgaggaatggcaccgtggtcataaagcctgctttcagcgccgtgattcctttttcctgggttaaatagttcgggaaccaggttaagaaaaaccacagtgtagaagccaccgcaaattgcccaagataaacgccgatcagtttacgatggaacaccagtttccagtctttggctgttaacggctgacgcgcctctttcttcaccggcgcatcaccatccaccagaccgccgccatcacgaatgtaatccagttcagctttgctgatacctttggtcaggcgcggcggctgataaaccttaaaccaaatcaggctccagataatgccgataccaccagtgacaatgaacacccagtgccagctcaacatctcctgaatccagatcagcagcggcgtcagaaacgccagaccgacaaactgaccagacgtataaaaaccaacggcagaagcgcgttcatgttccgggaaccagctggtcaccatccggttattggtcgggaaagcaggcgcttcgaaaataccggttatcgcgcgcagaccaattaaactcattaagcccgtggcaaagccctggaataaagtcgccacactccagccaaatatcgcaataaaataagtcacgcgagaacctacgcgatctaaaaaccaaccgccggggatctgacatagcgtataaagccaggcgaaggcgctaaatacatagcccatttccgctttggtaatgccgaactcttcctgaatatgggcggaagccacggccaggttggcgcggtcgacataacaaatgactaccgtaataaagatcatcaccagcgtcagataacgccgacgccccggctttgctgcattaacgggaatatccatagcgagctttctccagattttgggcatagcgaagccgctcaccatgccctgtaatttacagagggttatatttttgtattgctgttttagtgcccgatgaggggcttacgtggcaggaattaccactctgctacgctgttatcttcatgacgccagagcggattacgccagtccggggcatttttactgaactcaatcactttagcttcgtcgatttccacgcctaagcccggtttcgttaacggtttaaagaagccgccgaccatgctgaagtcttctttgtttttcacaaagtcgagtaactccgcgcctttgttgtaatgaattcccatactttgttcctgaagtacggcgttataggaaacaaagtcgatatgcaggcaagccgccagtgcaatcggtccgagcggacagtgcggcgcaagggtcacgtcataggcttctgccattccggcgattttgtagcattcggtaataccgcccgcgtgggagagatccggttgcagaatgctaataccacctgcctccagcacgcgtttaaaatcgaagcgactgaacatgcgttcacccgccgccagtggaatatgcgtttgtgccgccagtttcgggtagtattcggcttgttccgccagcaccggctcctcaataaacagcgggcgatacggctccagttctttaatcagcactttcgccatcggcgcgctgacgcgaccgtggaaatcaagaccaaactcaatctgattgccaaaagcttcacgaatttgtgccacggtgttaaccgccgcatctaccgcgcgggagttatcaattagccccagttcttcacaaccgttcagtttgaaggtatcgaagccgatttcgcgtagcgttttaatgccgtcgataacatccgccggacgatcgccgccaacccaactgtaggctttaattttgtcgcgaaccaggccgcccatcagttgccagaccggcgcattcagcactttacctttgatatcccataacgcctggtcaatcccggcgatggcgctcatcaggatcggaccgccgcgatagaatccggcgcgatacatcacttgccataagtcattgatgcggcttggatcctgaccaatcaaatagtcacccagctcgtgaactgccgcttccaccgtacgggcgcggccttcgatcacgggctcgccccaaccgaccacgccttcatcggtttcaattttcaggaacatccagcggggaggtaaacgatacgtggtaattttggtgattttcattgcactgcctctcgatacgccttaacaaatgctgctgcctgctgcgcggtgcgctctacggattgcccggcgcgatagagatcgctgcctaagcccgcccctgcacaacctgcgtctatccactgcgccaggttttctggcgtcacgccgccaacggcaaagactgcgatgtcgcttggcaataccgcttttaacgctttgatgtattgcggaccaaaagcgctactcggaaatattttcagcgcctgcgcgcccgcttcgagcgcggtaaaggcttcggtcgccgtcgcgcagccggggcagacggtcatgccgtagcccaccgcacggcggatcacttcactatggatattgggcgtaacgatgagctgacagcccatcctggcgagcgcatcgacctgttcaggtttcagtaccgtacctgcgccaatcaacgccttgtcgccgtacgcatcaacgatggcgggaatgctttgctcccattgtggggaattcagcgggatttcaaccgcgtcgaacccggcgtcaatcaccgcgccaacatgcgccagcgcctcgtcgggcgtaataccgcgcaaaatggcgatcagcgggagtttagtttgccactgcatgagcgatgctccttataccagcctgaaatgccgtgtcgcccgccaccgccgtcacgtcgcaacccatcgcctgaaaggcttgctggtagcgcgcggtcaggcttgttccggcgacaagggtgatggcgtgttgatgggccacatagtcgcgcatactggcgacctctgcgccaatcaacaaaccagagagaaattcgctgacctgttcgcggggaagtgttcccagcacatggctggcgcgaacttcaaaaagctgcggcaatatggcgggcgtattaagaccacgctcaaggccagctgtgaaggcatcggcagagttttcctgcggcggcaaacctgcgccaatcaaactgtgatttaacagtaaatgatgtaattcaccggtcatcacggtgcgaaaatcgttgatttgctggctatcggcctgcacccatttgcaatgggttccgggcatgacataaagagaggaaggagccagagctcgcgcgccgatcaattgtgtttcttcgccgcgcatcacattgtggttatcgtcatgagagacacataatccgggaataatccagatattgtcgccaacactcgttaattgttcgccaatagagctaaaacaggcaggaacagataaatacggtgcaactttccagccgacgttgctgccaaccattcctgccattaccactggcgttttctcttcacgccagtcggtcgtgacttctgctaacaccgcagccggagattttccgttcaggcgcgtgacgcctgcttcactttgcctgctctccaggcagtggtcgccctgataaagccaggcgcgcagattggtgcttccccagtcaattgcgatgtagcgagctgtcatgtgatttcctttaaccttcgtgtgctgctggcgatcatggtaagcgccgcctgctctgccgcatcgccgtcctgatgtcgtatcgcatcgaacagcgccttatgttcctggagcgtttgcggcatgttggcctcatcgcccatccaggttcgttcaaaaaccgcccgctgcaggctactgatcgcaatgctaagttgctgtaacaccgggttatgcacgctctgcagcaccgcctcgtggtagcgaatatccgcttcgttaaacgcttcgcggtcctgattgttggcaatcatctcgttcagcgcgctttcaatctgcgccagatcgctggaagtcgcgcgctctgctgcccaacgggcaatcgccggttccaccagatttcgcacttcgctcatggcactgataagccgtgggtcgtagtcattttccagcacccattgcagtacgtcagtgtcgaggtaattccactggttacgcggtgccacaaacgccccgcgataacgtttcatttcaatcagccgcttcgccatcaggctacggaacacctcacggatgatgttgcggctggttgcaaactcctcacagagttccgcctcagccggaagcgggctgcctggcacgtatttgccgtgaacgatctgtttacccagcgtaatgacaatgcgatcggttttattgagagtcatggagagtccttgtgctctgtatgttcttctctactttaccccgatcgatgcataacgcggcaactttgtagtaccagcgtgatgacgttcgcgtttgccgtgcgtgtaatgtagtacaaacttatattgttgtactacaatttagatcacaaaaagaacaatgcataaaaaaatgacatgcgtcgggcagaaatctgaaaagggatatcaggcgctaaacaggagggaaagaagagtatgctttcaacggcttagctactcgtttaaaggattaatcatgaagttgaattttaagggattttttaaggctgccggtttattcccactggcgctgatgcttagtggctgtatcagctatgctctggtttcccataccgcaaagggtagtagtggaaagtatcaaagccagagtgacaccatcactgggctaagccaggcaaaagatagtaatggaacaaaaggctatgtttttgtaggggaaagcctggattaccttatcactgatggtgccgatgacatcgttaagatgctcaatgatccagcacttaaccggcacaatattcaggttgccgatgacgcaagatttgttttaaatgcggggaaaaagaaatttaccggcacaataagcctttactactactggaataacgaagaagaaaaggcactggcaacgcattatggttttgcctgtggtgttcaacactgtaccaggagtctggaaaacctaaaaggcacaatccatgagaaaaataaaaacatggattacagtaaggtgatggcgttctaccatccatttaaagtgcgattttatgaatactatagtcccagaggcattccggatggtgtttccgcagcattactgccagtgactgttacgctggacatcattactgcaccgctgcaatttctggttgtatatgcagtaaaccaataatcagtaagcgggcaaacgcgtttatgctgtttgcccgcccacagattaattcagcacatacttctcaatagcaaacgccacgccatcttcaaggttagatttggtgacaaagttcgccacttctttcacactaggaatagcgttatccatcgccacaccgacgcctgcatattcaatcattgcgatatcgttttcctgatcgccaatcgccatgatttcttccggtttaatacctaacacgtcggccagacttttcacccccgtacctttgttaacgcgtttatcgaggatttcgaggaagtacggcgcacttttcagcacggtatatttctctttcacttcctgcggaatacgcgcgatagcctggtcgaggatggcgggttcatcaatcatcatcactttcaggaactgggtattggggtccattttctccgcttcgcagaacaccagcggaatggtggcaacgaaggattcatgcaccgtgtagtagctgatatcacggttggcggtgtacagcgtggtgcggtccagggcgtggaaatgagaaccgacttcgcgagagagtttttccaggaaacgatagtcgtcatagctgagagcagtttgcgccacggtgctaccatcagcggccttctgtaccagcgcgccgttataagtaatgcagtagtcgcccggctgttccatatgcagctctttcaggtagttgtgcacacctgcatacgggcgacccgtcgttagcacgacattcacgccacgggcgcgagctgcggcaatcgcatttttaacggcgggactaatggtgtgatcgggcagcagaagggtgccatccatatcgatagcaatgagtttaatagccatgagttccccaggtagattggttcctgacccatgctaacgcgattccgctcaaaaatcagtacaacacccgagggaaaagggggatgcaacgcgcgttgcgtgctccctttttgcttagcggaagagtttccctttcagcagttccatgcctgcggaaagcagatcgttattggcttgtggactcacttcaccttgcggactgagcgcatcaataatcttcggcaattgttctgccagtaaactggaagctgtactggtatccacgccaagtttttgcccgagatcggacaccgcatttgtgccgagcgcgctttccagttgctcgccactaacgctttgattgccctgttgattactcagccaggtactgagaatggcccctaagccgccactttgcagtttttccagcagcacctgaatgccgccctgctcctcaacccaacttaaaatagcctgatatttccccgcatcgcctttcagaaaggcaccgacaacttcatcaaaaagccccatgataatcacctgtaaagcgttacgtgttgacccaaaaagtatagatttgcgggatgataattgcggattgcagaaataaaaagggcggagatgatctccgcccttttcttatagcttcttgccggatgcggcgtgaacgccttatccggcctacaaaatcatgaaaattcaatacattgcaagattttcgtaggcctgataagcgtagcgcatcaggcacgctcgcatggttagcgccattaaatatcgatattcgccgctttcagggcgttctcttcaataaacgcacggcgcggttcaacggcgtcgcccatcagcgtggtgaacaactggtcggcagcaatcgcatctttaacggtaacgcgcagcatacgacgactttccgggtccatagtggtttcccacagctgttccgggttcatctcgcccagacctttataacgctggatggagaggccgcgacgggactctttcaccagccagtccagcgcctgctcgaagctggctaccggctgacgacgctcgccacgttcgataaacgcatcttcttccagcaagccacgcagtttctcacccagcgtgcagatacgacgatattcgccaccggtgataaactcgtgatccagcggatagtcagtatccacaccgtgggtacgcacgcgaacaatcggctcgaacaggttttgctcagcattggtgtgaacatcaaacttccactggctgccgtgctgttctttgtcgttcagttcgctgaccagcgcgttcacccagcgggtaacggtctgctcatcagaaaggtcagcttccgtcaacgtcggctgatagataagctctttcagcattgctttcggataacgacgctccatacgattgatcattttctgcgtcgcgttgtactcagataccagtttctctaacgcttcgccagccaatgccggtgcactggcgttggtgtgcagcgttgcgccgtccagcgcgatagagatctggtactgatccatcgcttcgtcgtctttaatgtactgttcctgcttgcctttcttcactttgtacagcggcggctgagcgatgtagacgtgaccgcgttcaacgatttccggcatctgacgatagaagaaggtcaacagcagcgtacgaatgtggctgccgtcgacgtccgcatcggtcatgatgatgatgctgtgataacgcagtttgtccgggttgtactcgtcacgaccgataccacagccaagcgcggtgataagcgtcgccacttcctgagaagagagcatcttatcgaagcgcgctttctcgacgttgaggattttacccttcagcggcagaatcgcctggttcttgcggttacgcccctgcttcgcagagccgcccgcggagtccccttccaccaggtacagttcggaaagcgccggatcgcgttcctggcagtctgccagtttgcccggcaggcccgctaagtcgagcgcacctttacggcgggtcatttcacgcgcgcgacgcgccgcttcacgggcacgggcagcatcgataattttgccaaccacgattttcgcgtcggttgggttttccagcaggtattctgccagcagttcgttcatctgctgttcaaccgcgcttttcacctcagaagaaaccagtttgtctttggtctgggaggagaatttcgggtccggcactttcacggaaacgaccgcaatcaggccttcacgcgcatcgtcaccggtggcgctgactttggcttttttgctgtagccttctttgtccatgtaggcgttcagggtacgggtcatcgccgcacggaagcctgccaggtgagtaccgccgtcacgctgcggaatgttgttggtaaagcagtagatgttttcctggaagccatcgttccactgcaacgccacttcgacgccaataccgtctttttcagtggagaagtagaagatattcgggtggatcggcgttttgttcttgttcagatattcaacgaacgccttgatgccgccttcatagtggaagtggtcttctttgccgtcgcgcttgtcgcgcagacgaatggaaacgccggagttgaggaagctcaactcacgcagacgtttcgccagaatttcatattcgaactcggtcacattggtgaaggtttcgaggctgggccagaaacgcaccatggtgccggttttttcagtctcgccggtaaccgccagcggggcctgcggtacaccgtgttcgtagatctgacggtgaattttaccctcgcgctggataaccagctccagtttttggctcagggcgtttactacgctaacaccaacgccgtgcagaccgccggacactttataggagttatcgtcaaatttaccgcctgcgtgcagaacggtcatgatcacttccgccgcgcttacgccctcttccgggtgaataccggtcggaatgccgcgcccgtcatcctgtacagagacagagttatcggcgtgaatggtgacgataatttctttacagtgacccgcgagcgcttcgtcgatagcgttatctaccacctcgaataccatgtggtgcagaccggtgccgtcatccgtgtcgccgatatacatacccgggcgcttacgcaccgcatccagccctttcaggactttgatactggaggagtcataagaattgctcatcaacgtttctcgctcatttatacttgggttaatccgttattttacccttttccacggtaaacatcttgctattttcgtcgctcatgtctataacgtgttcagcactgatcgcgctgacaaagacctgactttgcgtcgcttttaagcggctggcaagcagcccgcgacgctcatcatcaagctcagaggcaaaatcatctatcaggtagagacaccgccgcccgctttcacgggtgaggaactctccttgcgccagacgtaaggcgcacatcaacagcttaagctgcccacggcttaaggtatcttccaccggcgcaccgtcggcgcgaatgcgtaagtccgctttgtgcgggccgtgcgcggtgtaggttagctggcgatcgcgttcaaaattacgttccagcacctcagcatattctgtctctttctcccagccgcgctggaaagagaaagtcagagaaaactcagggagaaattgcttacaggtatcagccatatcggccgcgataccggcgctatactccgcgcgccaggtgctgatttgctccgccagcgggatcagctctttatcccacgggcgtagctgttcgtaacgtgtcacctggcgcagcgccgcattgcgctgcttgagcaatcgcttgagattgctccaggcggtgaaaaatccgggttcgttgtgaaagcatccccagtcgaggaatgctcttctgtatttggggccgccgttgagtaaagtaaacccttctggcgttatcaactgcattggcatcaggtgcgccagttccgcgaccttatgcccgtctgtaccgtcgatgcggactttgctgtcgccctgtttgtctttggttaagccaatcgctgtctcgcgctcttcgccctgtaatcgcccgtggagaacaaacgcctcctgctcatggcgaatgacgcgaccaatctgcaaactgcgaaacgcccgaccatggccgagcgtatagatggcttccagcacgctggttttgccactgccgttggcacctaccagaaagttaaagccgggagataaggcgagatccgcggtttcaatgttgcggaaatcgcggatcaacaagcgggtgagggacattacagtctcattggcatgacaacataagccgcgctctggctggccgcatcttcaatctgcacgctggaaacgctatcggtcagcatcatgcggacgttttcgcatttcagcgcgttcagaacatccagcacataactgacgttgaagccgatttccatctccgcaccgctataggtaacgtcgaggatctcttccgcttcttcctgttccgggttgttggcggtgattttcagctggttttcgctgacataaagacgtacgccgcggaatttctcgttagagagaatcgccgcgcgagcaaacgcctgcttgagcagatcgcagccagcttccagatgtttgtccgggttcttcggcagaacgcggcgataatccgggaagcgaccatccaccagtttggaggtgaagataaagtcgccaacgtgggcgcgaatgttgttgctgccaatctgtacgcgcagcggattgtcgccgccgtcgagcatacgcatcagttcaatcacgcctttacgcggtacgatcacgctatggcttggcaaagattgaccaattggcatactacagaccgccagacggtggccgtcggttgccacggtgcgcagttcttcaccttcggtttcaaacagcataccatttaagtaatagcgaacgtcctgatgcgccatagaaaactgggtcgcttcaatcagacgcttcatcgttgcctgcggcagggtaaattcgacttcactctgccagtcatcgaggttcgggaaatccgccgctggcagggtagacaggctaaaacggctacgcccggagcgtaccagcatccgttcaccttccagctgcacggcaatttccgcgccttcaggcagaccacggcagatatcaaagaatttgcgcgccggaacggtcgtcgctcctggctcgtgtggctgaaccagcgcaacacgtgccaccatttccatctcgagatcagtaccggtcaggctcaacgtaccgtcagcaacctgtaacagcagattaccgagaatcggtagcgtaggacgaccacctaacggaccgctcacctgttgtagcggttttaataaatgctcacgttctacggtaaatttcataggtttagctactcaatgttctgattaaattactaaaatcttctttgatatcgtggctctcttcacgcaactgctcgatcttacggcaggcatgaagcaccgtcgtgtggtcacggccaccaaacgcatcgccaatctccggcagactgtggttagtcagctctttcgccagcgccatcgccatctggcgcggacgcgccacgctgcgggatcgacgcttggaaaggagatccgcgactttgatcttgtagtactccgccaccgtcttctgaatattgtcgatggtgaccagtttttcctgcaatgccagcaagtcgcgcagcgcctcacgcacgaagtcgatggtgatcgcccgtccggtaaagttggcattggcaatgacgcggttcagcgccccttccagctcacgtacgttagatcgtagacgcttggcgataaagaacgccacttcgcccggcaaacgaatgtcgttttcgtcggcctttttcatcaggatcgccacacgggtttccagctctggcggttcgatcgccacagtcagtccccaaccgaagcgggatttcaaacgatcctcaacgccgttgatctctttcggatagcgatcgctggtgagaatgatctgttgattaccttccagcagggcgttgaaggtgtggaaaaactcttcctgagatcgttctttattagcaaaaaactgaatatcgtcgatcagcagtgcatctacggaacggtagtagcgtttaaactcttcgatcgcgttgttttgcagggctttaaccatgtcctgaacaaagcgctcggagtgcatataaaccactttggcattcggcttgcgcgccataatgccgttacccaccgcatgcagcaggtgagttttacccagacccgtgccgccataaaggaacaacgggttataggcaccgccagggttatccgccacctggcgagccgccgcgcgcgccagttggttagatttaccttcaacgaagttatcaaacgtgtgtttgacgtttacgttagaacgataggtcggttctgccggggccgggacgttatcccaaccactgcgcgtagaaggcgcagcacgttgcggctgcgtttgcgccacctgtgcaggggccgcgacgttgctcgtcactgccgcttgtggcgtttgcgtcaccggtttggtgccgacttcaaaacgcagctgtggggcatccgctccgcagaaactggttagcagtccattgatattattaaggtacttgtcccgtacccaatcgaggacaaaacggtttggcgcgtacagggccagcgtgttatcgctcagttccgcctgcaatgggcgtatccacatactgaattctgtggctggtaactcatcctgcaatcgggcaagacactgctgccaaaggctaagactcacggcggactccactcgaacaaaagtcgataatgactaaggctgaaacattcatgattgttgacgtacgtcgaaaagaccctgcttgagggtgacgcacgaaccgctgtctgcggttatatgcccgatcaagatcctgcaaaacgatcgggaccgcggatcatagcctaaactgcgcaagagatcttctgtttctcacagattttcccgatttatccacaggactttccagaactcgctaagtgtaaacgatcctgccgcgaggcgggcacgatttacgccgcatattggaaaatttaatgaccatagacaaaaattggcttaatcgatctaataaagatccaggacgatccttgcgctttacccatcagcccgtataatcctccacccggcgcgccatgctggtttccactggtgtgaggtcgtacattttccctgcgaaaaggtgcggaaaagcgcggtaaataaggaaagagaattgactccggagtgtacaattattacaatccggcctctttaatcacccatggcttcggtgtccatcgtttcatttttcggcggatatccaataaagccattgaatttattcaagtttaggtagaaatcgccatgaaacgcacttttcaaccgtctgtactgaagcgcaaccgttctcacggcttccgtgctcgtatggctactaaaaatggtcgtcaggttctggcacgtcgtcgtgctaaaggccgcgctcgtctgaccgtttctaagtaataaagctaacccctgagtggttaagctcgcatttcccagggagttacgcttgttaactcccagtcaattcacattcgtcttccagcagccacaacgggctggcacgccgcaaattaccattctcggccgcctgaatagcctggggcatccccgtatcggtcttacagtcgccaagaaaaacgttcgacgcgcccatgaacgcaatcggattaaacgtctgacgcgtgaaagcttccgtctgcgccaacatgaactcccggctatggatttcgtggtggtggcgaaaaaaggggttgccgacctcgataaccgtgctctcagcgaagcgttggaaaaattatggcgccgccactgtcgcctggctcgcgggtcctgacttaatcggaagcgttggaaaaattatggcgccgccactgagccctggcagccgggtcctgatagccctcattcgggtctatcaacgcctgattagtccgctactcgggccgcattgtcgtttcactccaacctgtagtagctacggaattgaggcattgcgcaggtttggagtgataaaaggcagttggttgacggtgaaacgcgtattaaaatgccaccctttacaccctggtggtgacgatcccgtcccgcccggaccatttgataccagagaacactaacgatggatagccaacgcaatcttttagtcatcgctttgctgttcgtgtctttcatgatctggcaagcctgggagcaggataaaaacccgcaacctcaggcccaacagaccacgcagacaacgaccaccgcagcgggtagcgccgccgaccagggcgtaccggccagtggccaggggaaactgatcagcgttaagaccgacgtgcttgatctgaccatcaacacccgtggtggtgatgttgagcaagctctgctgcctgcttacccgaaagagctgaactctacccagccgttccagctgttggaaactagtccgcagtttatttatcaggcacagagcggtctgaccggtcgtgatggcccggataacccggctaacggcccgcgtccgctgtataacgttgaaaaagacgcttatgtgctggctgaaggtcaaaacgaactgcaggtgccgatgacgtataccgacgcggcaggcaacacgtttaccaaaacgtttgtcctgaaacgtggtgattacgctgtcaacgtcaactacaacgtgcagaacgctggcgagaaaccgctggaaatctccagctttggtcagttgaagcaatccatcactctgccaccgcatctcgataccggaagcagcaacttcgcactgcacaccttccgtggcgcggcgtactccacgcctgacgagaagtatgagaaatacaagttcgataccattgccgataacgaaaacctgaacatctctagcaaaggtggttgggtggcgatgctgcaacagtatttcgcgacggcgtggatcccgcataacgacggtaccaacaacttctataccgctaatctgggtaacggcatcgccgctatcggctataaatctcagccggtactggttcagcctggtcagactggcgcgatgaacagcaccctgtgggttggcccggaaatccaggacaaaatggcagctgttgctccgcacctggatctgaccgttgattacggttggttgtggttcatctctcagccgctgttcaaactgctgaaatggatccatagctttgtgggtaactggggcttctccattatcatcatcacctttatcgttcgtggcatcatgtacccgctgaccaaagcgcagtacacctccatggcgaagatgcgtatgttgcagccgaagattcaggcaatgcgtgagcgtctgggcgatgacaaacagcgtatcagccaggaaatgatggcgctgtacaaagctgagaaggttaacccgctgggcggctgcttcccgctgctgatccagatgccaatcttcctggcgttgtactacatgctgatgggttccgttgaactgcgtcaggcaccgtttgcactgtggatccacgacctgagcgcacaggacccgtactacatcctgccgatcctgatgggcgtaacgatgttcttcattcagaagatgagcccgaccacagtgaccgacccgatgcagcagaagatcatgacctttatgccggtcatcttcaccgtgttcttcctgtggttcccgagtggtctggtgctgtactatatcgtcagcaacctggtaaccattattcagcagcagctgatttaccgtggtctggaaaaacgtggcctgcatagccgcgagaagaaaaaatcctgattcggtgagttttcgctaaaataagggcggtcagttgaccgccttttttcttttcgtagggcggataagcaccgcgcatccgccacacaaagcaacaggaacatcatgagcgataatgacactatcgtagcccaggccacgcctccgggacgtggcggcgttggcatcctgcgcatctccggcttcaaagcccgtgaagttgccgaaaccgtgctgggtaaactgcctaagccgcgctacgccgattatcttccgtttaaagacgccgacggcagcgtgctcgatcaggggattgcgctatggttccctggcccgaacagcttcaccggcgaagatgtgctggaactgcaaggtcatggcggtccggtgatcctcgacctgctgttaaaacgcattctgaccattcccggcctgcggattgctcgccctggtgagttttccgaacgcgcgtttcttaacgataaacttgacttagcccaggccgaggcgattgccgatcttatcgacgccagtagcgaacaggcggcccgtagcgcacttaacagcctgcaaggcgcattctccgcacgggttaatcatctggtagaagccctcacccacttgcgcatttacgtcgaagcggcaattgatttccccgatgaagagatcgatttcctctccgacggaaaaattgaagcccagctcaatgacgttattgccgatcttgatgcagtgcgtgctgaagcacgtcagggtagtttgttgcgcgaagggatgaaagtggtgattgccggacgtcctaacgccggtaaaagcagcctgttaaacgcgctggcggggcgtgaagcggcaatcgtaaccgatatcgccggaactacgcgtgacgtgctgcgtgagcatatccacattgacggaatgccgctgcatatcatcgataccgccgggctacgtgaagccagtgacgaagtagaacgtattggtatcgagcgcgcgtggcaggaaattgaacaggccgaccgcgtgctgtttatggtcgatggcaccacaacagacgccgtggatccggcagagatctggccggaatttattgcccgtctgccagcgaaactgccgatcaccgtggtgcgcaataaagccgatatcaccggcgaaacgctgggaatgagtgaagtgaacggtcacgcgttaattcgtctcagcgcaaggactggtgaaggcgtggacgtgctgcgtaaccatctcaaacagagcatgggctttgacaccaacatggaaggcggcttcctggcgcgtcgtcgccacctacaggcgctggaacaggcagcggaacatctacaacagggcaaagcgcaactgttgggagcctgggcaggtgaactgctggcggaagagttgcgtctggcacagcagaacttaagcgaaatcaccggggaatttactagtgacgacctgctggggcggattttctccagcttctgtattggtaagtaaccgcgcttacgaggccgcattctgactgtcagatgcggcttcgcttcattgttaccactcctgttattcctcaaccctttttttaaacattaaaattcttacgtaatttataatctttaaaaaaagcatttaatattgctccccgaacgattgtgattcgattcacatttaaacaatttcagaatagacaaaaactctgagtgtaataatgtagcctcgtgtcttgcgaggataagtgcattatgaatatcttacatatatgtgtgaccagtaaatggttcaatattgacaacaaaattgtcgatcaccgcccttgatttgcccttctgtagccatcaccagagccaaaccgattagattcaatgtgatctatttgtttgctatatcttaattttgccttttgcaaaggtcatctctcgtttatttacttgttttagtaaatgatggtgcttgcatatatatctggcgaattaatcggtatagcagatgtaatattcacagggatcactgtaattaaaataaatgaaggattatgtaatggaaaactttaaacatctccctgaaccgttccgcattcgtgttattgagccagtaaaacgtaccactcgcgcttatcgtgaagaggcaattattaaatccggtatgaacccgttcctgctggatagcgaagatgtttttatcgatttactgaccgacagcggcaccggggcggtgacgcagagcatgcaggctgcgatgatgcgcggcgacgaagcctacagcggcagtcgtagctactatgcgttagccgagagtgtgaaaaatatctttggttatcaatacaccattccgactcaccagggccgtggcgcagagcaaatctatattccggtactgattaaaaaacgcgagcaggaaaaaggcctggatcgcagcaaaatggtggcgttctctaactatttctttgataccacgcagggccatagccagatcaacggctgtaccgtgcgtaacgtctatatcaaagaagccttcgatacgggcgtgcgttacgactttaaaggcaactttgaccttgagggattagaacgcggtattgaagaagttggtccgaataacgtgccgtatatcgttgcaaccatcaccagtaactctgcaggtggtcagccggttagtctggcaaacttaaaagcgatgtacagcatcgcgaagaaatacgatattccggtggtaatggactccgcgcgctttgctgaaaacgcctatttcatcaagcagcgtgaagcagaatacaaagactggaccatcgagcagatcacccgcgaaacctacaaatatgccgatatgctggcgatgtccgccaagaaagatgcgatggtgccgatgggcggcctgctgtgcatgaaagacgacagcttctttgatgtgtacaccgagtgcagaaccctttgcgtggtgcaggaaggcttcccgacatatggcggcctggaaggcggcgcgatggagcgtctggcggtaggtctgtatgacggcatgaatctcgactggctggcttatcgtatcgcgcaggtacagtatctggtcgatggtctggaagagattggcgttgtctgccagcaggcgggcggtcacgcggcattcgttgatgccggtaaactgttgccgcatatcccggcagaccagttcccggcacaggcgctggcctgcgagctgtataaagtcgccggtatccgtgcggtagaaattggctctttcctgttaggccgcgatccgaaaaccggtaaacaactgccatgcccggctgaactgctgcgtttaaccattccgcgcgcaacatatactcaaacacatatggacttcattattgaagcctttaaacatgtgaaagagaacgcggcgaatattaaaggattaacctttacgtacgaaccgaaagtattgcgtcacttcaccgcaaaacttaaagaagtttaattaatactacagagtggctataaggatgttagccactctcttaccctacatcctcaataacaaaaatagccttcctctaaaggtggcatcatgactgatcaagctgaaaaaaagcactctgcattttggggtgttatggttatagcaggtacagtaattggtggaggtatgtttgctttacctgttgatcttgccggtgcctggtttttctggggtgcctttatccttatcattgcctggtttagtatgcttcattccgggttattgttattagaagcaaatttaaattatcccgtcggctccagttttaacaccatcaccaaagatttaatcggtaacacctggaacattatcagcggtattaccgttgccttcgttctctatatcctcacttatgcctatatctctgctaatggtgcgatcattagtgaaacgataagtatgaatttgggttatcacgctaatccacgtattgtcgggatctgcacagccattttcgttgccagcgtattgtggttaagtagcttagccgccagtcgtattaccagtttgttcctcgggctgaagattatctcctttgtgatcgtgtttggttcttttttcttccaggtcgattactccattctgcgcgacgccaccagctccactgcgggaacgtcttacttcccgtatatctttatggctttgccggtgtgtctggcgagttttggtttccacggcaatattcccagcctgattatttgctatggaaaacgcaaagataagttaatcaaaagcgtggtatttggtagcctgctggcgctggtgatttatctcttctggctctattgcaccatggggaatattccgcgagaaagctttaaggcgattatctccagtggcggcaacgttgatagcctggtgaaaagcttcctcggcaccaaacagcacggcattatcgagttttgcctgctggtgttctctaacttagctgttgccagtagcttctttggtgtcacgctggggttgttcgattatctggcggacctgtttaagattgataactcccacggcgggcgtttcaaaaccgtgctgttaaccttcctgccacctgcgttgttgtatctgatcttcccgaacggctttatttacgggatcggcggtgccgggctgtgcgccaccatctgggcggtcattattcccgcagtgcttgcaatcaaagctcgcaagaagtttcccaatcagatgttcacggtctggggcggcaatcttattccggcgattgtcattctctttggtataaccgtgattttgtgctggttcggcaacgtctttaacgtgttacctaaatttggctaaatccttcaagaagccagccattcgctggcttcttgcctctcaggaaatcacttatgtccaaatggcaactcgcctgatcctccttcaccacgtatgctttgcgtcaccttactatcaggacgctttagcccatgtcccgctttttgatttgtagttttgccctggttttactttatcccgccgggattgatatgtacctcgttggtttaccgcgcatcgccgccgatctcaatgccagcgaagcgcagttgcatattgcgttctccgtatatctggcggggatggcagctgcgatgttatttgccggtaaagtggccgatcgtagtgggagaaagccggtcgccatacccggcgcggcgctatttattattgccagcgtgttctgtagtctggctgaaaccagcacgttatttcttgcaggccgatttctacaggggttgggcgcaggctgttgttacgtagtggcgttcgctattttgcgcgacacgctggatgatcgacgtcgggctaaagtgctgagtttactcaacggtattacctgcatcattccggtgttagcgccagtgctcggacatctgattatgcttaaattcccgtggcagagtctgttctgggcgatggcaatgatgggcatcgcggtactgatgttgtctttgtttattttaaaagaaacgcgcccagcggcccccgcagctagcgataaaccacgagaaaatagcgagagcctgcttaaccgttttttcctcagccgtgttgttatcaccaccctcagcgttagcgtgatcctcactttcgtcaacacgagtccggtattgctgatggaaatcatggggtttgagcgcggtgaatacgccaccattatggcgctgaccgctggcgtcagcatgaccgttagtttctccacgccatttgcgctgggaatttttaagccacgtacgttgatgatcaccagccaggtgttattcctggcggcggggatcactcttgccgttagtccttcccatgcggtttctctgtttggtatcacgctgatttgcgccggtttcagcgtaggttttggtgtggcgatgagtcaggcgttagggccgtttagtttacgcgcgggcgtagccagcagcaccttaggtattgcgcaggtttgcggtagcagtctgtggatttggctggcagcggtggttggtatcggcgcatggaatatgctgatcgggattctgattgcctgtagcatagtgagcctgttgctgattatgttcgtcgcgcctggacgccccgttgccgctcatgaagaaatccatcaccacgcttgatctcaatctgctgctttgtctgcaactgctgatgcaggagcgcagcgtaaccaaagcggcgaagcggataaacgtgacacctagcgcggtgagtaagagcctggcaaagttaagagcgtggtttgacgacccgctctttgtgaacagtccgctgggtctgagccccacaccgctgatggtcagcatggagcaaaatctggcggagtggatgcaaatgagcaacctgctgctggataaaccgcaccaccagacaccgcgcggcctgaagtttgagctggcggcggaaagtccgctgatgatgatcatgcttaatgcgctgagcaaacagatctaccaacgttacccgcaggcgaccatcaaattacgtaactgggattacgattccttagatgccattactcgtggtgaagtggatatcggtttttccggtcgcgaaagccatcctcgcagccgggagctgttaagcagcctaccgttagccattgattatgaagtgctgtttagtgatgtgccctgcgtctggttacgcaaagatcatccggcactgcatcaaacgtggaatctggacaccttcttacgttatccgcatatcagcatttgctgggaacagagcgatacctgggcgctggacaatgtgttacaggagctgggacgcgaacgcacgattgctatgagcctgccggaattcgagcagagtctgtttatggcagcgcaacccgacaatctgctactggcgaccgcgccgcgctactgtcagtactacaatcaactccatcaactgccgttggttgctcttcctctcccgtttgacgaaagccagcaaaaaaagctggaagttccttttaccctgctgtggcataaacggaacagccataatccgaagatcgtctggttacgggaaaccattaaaaacctttacgcgagcatggcataaccgaatcgtatgaaacgcgacccaatttcacaataaaatgtaaaaaagttgtaataagcttgtctgaatcgaacttttagccgctttagtctgtccatcattccagtaaatgattactcttgtattcataatggaccattaagcatggagcgaaaaatggcgactcactttgcccgagggattttaacggaaggacatctgatttctgttcgtctcccctcccagtgtcatcaagaagcccgaaacattccccctcatcgtcaaagccgttttctggcgtccagaggtttactcgcagaactgatgttcatgctgtatggcattggcgaattgccggaaatcgtcaccctgccgaaaggtaaaccggttttcagtgataaaaatttgcctagcttttccatttcctatgccgggaatatggttggcgtggcgttaacaaccgaaggtgaatgtggcctcgatatggaactacagcgtgcgacgcgcgggtttcatagcccacacgcgcccgataaccacaccttttccagcaatgaaagcctatggatcagtaaacaaaacgatcctaacgaagcgcgggcgcagctcatcacgctgcgccgaagcgtgctaaaactaaccggtgatgttttgaatgacgatccgcgcgatctgcagctgctgcccattgccggacgcctgaaatgtgctcatgtaaatcatgtagaagcgttatgcgacgcggaagacgtgctggtgtggtccgtggcggtcacgcccacgattgaaaagctcagtgtctgggagttagatggcaaacacggctggaaaagcctgccggatattcacagccgcgccaacaatcctaccagccggatgatgcgttttgcccaactctctaccgtgaaggcttttagcccaaattgatagacaaccacaggagtcatcatgtctgaaaaattgcaggtggttacgttactggggagcctgcgcaaaggcagttttaatggcatggttgcacgtaccctgccgaaaattgctccggcgagcatggaagtcaatgcgttaccatccattgccgacattcccttgtatgacgctgacgtacagcaggaagaaggttttccagcaacggttgaagctctggcggaacagatccgtcaggctgacggtgtggtgatcgtcacgccggaatataactacagcgtaccgggtgggctgaaaaatgccatcgactggctttcccgcctgccggatcaaccgctggccggtaaaccggtattgattcagaccagcagtatgggcgtgattggcggcgcgcgctgtcagtatcacctgcgccagattctggttttcctcgatgcaatggtgatgaacaagccggaatttatgggcggcgtgattcagaacaaagttgatccgcaaaccggagaagtgattgatcagggtacgctggaccacctgaccgggcaattgaccgcatttggtgagtttattcagcgagttaagatctaaataaaaaacccgccagcaatcatgcatggcgggtttttaacgcgctatcgattttagtgagcgtcgataaagacaatcttcaggataaacagcagcgcaacgatgattacgcacgggcttagatcacgcagacgtccggtaccgattttcatcacgcagtaggagataaagcccagcgcgataccttcggtaatgctgaagctgaacggcatcatcacggcggtaataaacgccggaacagattcagtaagatcctgccagttcacgcgtgccagactggaagtcatcagcacgccaacgtaaatcagcgcaccagctgcagcgtagcctggcaccatccccgccagcgggctcagaaagataaccagcaggaacagcagaccaacaaccactgccgtcagaccggtacgaccgccaacgcttacgccggaagaggactcaatataagccgtaacggaagaagtaccgataaagctaccggtcacggaagagatactgtcgacatacagcgcctgcttcatgcgcgggaatttccccttctcatccgccagacctgctttatcggtcacgccaatcagcgtaccggaggagtcaaacaagttgaccaacatgaaagagaaaatcacccctgccagcccgaggttaaagctcccggctaaatctacatgacccacaactgtcattacgctcggcggcgcagaaacgatgccattgtagtgcacatcacccagcatccagcccagcagcgtcgtcaccacgatagaaaccagcaccgctgcgtgaatgttgcggctggccagaatagcaatgatgaagaagccgaggatacccagaagtacgctgtgagaagtcagattaccgatgctcaccagcgtttccgggttagcgacaatcacacctgcgtttttcagccccatcatgccaatgaacagaccgataccgctggtaatacccacacgcagactcaccggaatgttggctatcatccagtagcgaacgcggaaaatcgtcagtaacagcagacctatcgcgccccagaagattgcgcccatcccgacctgccacggcaagcccatcgcctgtacaacgacaaaagcgaagaacgcattcaggcccatagcgggtgccagtgcaactggcaggttagcaaacagtcccatcataatactgccgaatgcagcgatcagacaggtagtgacgaagacggcgctggtatccatgccagcaacgccaagaatttgcgggttaacaaaaacgatgtaaaccatcgtcaggaaggtggtaaaaccggcgatcacttcggtccgtgccgtcgtgccatgttcgcgcagtttaaacacgcgttccagcatcccctgaccagaagtctgggtggtatgttgatgactcattatctatttccgaacaaggagggaaaatccgtcgctatcgtataccaaaatgcgacaataggcgcgtttgtgagagacttttttattggatttacttatacggcaacgattgcgttgcgcaaatcggctctacgaaaacgttaaactgattaaaaaggaaaggcatgtcccggatagaagcggtatttttcgactgcgacggtacgctggtcgacagtgaagtcatttgctctcgcgcatatgtaacgatgtttcaggaatttggtattacgctcgatcctgaagaggtattcaaacgtttcaaaggtgtaaaactgtacgaaattatcgatattgtttcccttgaacatggtgttacgttagcgaaaacagaagctgaacacgtttaccgtgcagaagtcgctcggctgttcgatagtgaactggaagccatcgaaggggctggagcgctcctgagtgcgatcactgcgccaatgtgtgtggtatctaacggcccaaataacaaaatgcagcattctatgggcaagctgaatatgttgcactacttcccggataaactgttcagcggctacgatattcagcgctggaagccagacccggcgttaatgttccatgcggcaaaagcgatgaatgtaaatgtagaaaactgcattctggttgatgacagtgttgccggtgcacaatctggtatcgacgcaggtatggaagtgttctacttctgcgccgacccgcacaataagccgatcgttcacccgaaagtcaccacctttacccatcttagccagttacctgaactgtggaaagcgcgtggttgggatattacggcataattcttcacactcccttcacttaccccgcttaaattggcgctcaaaggtaagtaaagggagtttgatatgtctgttagtcgtcgggtaatacatcacggactttattttgcagttttaggaccgttaattggtgttctgtttcttgtcctctacatattcttcgcaaaagaaccgctggttctttgggtgataatacatccaatttttctcttattgagcataactacgggagctattcctgcgttgttaaccggtgtaatggttgcctgtctgccggaaaagatcgggagtcagaaacgttatcgttgtctggctggtggcataggtggcgtcgttatcaccgagatctattgtgcagttattgtacatattaagggcatggcttccagcgagttgtttgaaaacattctttctggtgacagtctcgttgtccgcatcattcctgcattgctggcaggtgtggtgatgagcagaatcattacccgtctacccggattggatattagttgtcctgaaacagactctttaagttaagcgggatactttatctttgggctactcaaaagcagacaggatgtttctatgactcaaaatatcaggccgttaccccaattcaaatatcatcccaagccactggaaacaggcgcatttgaacaggataaaaccgtagagtgcgattgctgtgaacaacagacgagtgtttattacagcggtcccttttattgcgttgatgaagttgaacatctctgtccgtggtgtattgcggacggttctgctgctgaaaagtttgcaggtagttttcaggatgatgccagcatagaaggtgttgaatttgagtatgatgaagaggacgaatttgccggtattaagaacacatatcctgatgaaatgctgaaagagttggttgaacgcacgccaggttatcatggatggcagcaggaattctggctcgcgcattgtggcgatttctgtgtttttatcggctatgtgggctggaatgatataaaagatcgcctcgatgaatttgccaaccttgaagaagattgtgagaatttcggtattagaaattctgatctagctaaatgcctgcaaaagggtggtcattgtcagggttatctcttccgctgtctccactgcggcaagctgagactgtggggtgattttagctaattatttaaataatgagaacaggccggagcgtaattcacacatccggccttatttcttaagcttaaccgagtgctaattctgcggcagcggctttatcagcgattaccatcaggctaggatgcagctgcaacacggaagctggaacatcttcggtaaccggaccttgcagaacatttttcagtgcctgcgctttacccgcgccgctgacaattatcagcaagtttttcgccgccatgatgcttttcggccccatcgtcacgtagctgtcaggcactaagctaaagtcgccgcccaactcgccatgcgccacaatatcaaccatctctccctggatcgggaactccacggtttgctcatggaaatgggtcgtattcggcaaattgccacaaaaatgaccatctgcacctaatcccagcaccaccaaatccagtccgccttcacgcgccagtttctgatcatgctcgcggtagttatcaatagtgagcttctggatattctcttctttgatccccgcaggggtgaaaaacagattacgcagattggtaatcgttacgccttctccctctttgccgcgaaatggaatttcatcaaaattatagaaatagcagttatcgtaccagggcttacctttaaccagggtggtgaggtattcatacatgcctttgggcgtgctaccggcggtaattgccaggttaacacgacgcgtcttgctcatataaccaagcagatggtgtgccgcgacacggctcatttcctggtaatcttcggtaatgattaatttcatcttaatgccttattttatttaaataatttctgtacaaaggctgcataggctggtcgccagacatccatttcatggttcagacccggatattcctggtaatcaaagttaatttttttctgctcaagctcagttttcagcccggcgatatccttgccggttacgacatctttatcccccacaaccacagtaaaattacgtagttgctggttgatagctgccggatcgttcagtcgggccgcgacaccttcatccggtacggttgtcgtggtaacaccactgaatgtggccagccagccaaagctttccagatgattcattccggaaaccagcgcctggtacccgccttgactaagccctgccagcgcgcggccatcggcatctttacggacattaaaacgcttgctaatcagcgggataatatcgttcatcagttcgcgatctgccgctttagcattcagcggataaaagactttacgtctttcctgaggcacgaaatcttcgggaataatgcccttcgcatcggtttctgtatccgggatcaccaccagcatcggtttaattttcccttcagcaagcaggttatccatgatttgcgggatacgcccctgatcgatagcggaacgtccggtatcaccaaagccgtgatagaaatagagcactggcaaaggctcgcccatgccggtgtatcctggcggggtccagacatacatctgacgttcagattgcaatgcgttggagtggtaagttatggcgatcaaatcaccatgcgcaacagaacgcgtatccagataactgcctggcaccagaatcatactggagttaacctggcgctgaggattagtcattgcggtgcctgtatcaatgctgcgtacaccatcaacattgaaaaaatactcgtacaggttgcctttcaggataggtgtgcgccagctccagactcctgcttcgtctttggtcatcgggtgaatattgtccggaaccggaacacccaccactacagagacattttttgccccaggggcaaagtagcgaaaggtcacgctgttatcggcattgacctgagtcacatactgtttcaccgggatagtgggtgccgggctggctggcatatccgctgctatggcccactgagcagaaataccgctggcaatagccagcgttaaagcagcaatttttatattcatcgtaatattcctttcattaagttccattaccaccagatttcagcctgggcaccgacagcaaactggtcgtctttattgtcttcaaaggtgaagccatccagttcgttttccagggctttgatatacgtggcgtagaaacgaatttccggacggctggtcaacatactggtattgactttaaaggtatggaagagcgtggttttataaccagactcattaaatttattactattcgcatctttgttttgctgggtgaaatagcccagttcaacacctgtctggttatattggtcccaaatataggccgggcgaacaaccgcacgaatagattcgaaatcagagtgggcgcctgtttcgtagctatatatatcgttaccgaaggagtaaacaatcgcgttagctacaatgaaatgatcgccaatataggcttcgccctggctagtcagacgtaccgctgttccgccggtgtgatcaccataataacgaccattaaaggtggtaaatggacttgcgccagcataacggccaaagttactggcgatagagttattcgcgaccaggaaggagaattcgttgaagccacctttatcaaatttctgcgttaaagatgtgccaaacatccaggtatctttccagtcataatacccgttattatcctgattatctttttcgcttgcgctttcgtttgccgtgacataacgaccacttaccattaaggtggctttatcccataacgggatatctttatagcgtaaatcaatggtattggtattaatctgctgtttgttttgcaggctgcgatcgtaatcatcgacatcttcgcgaaccagcgcgatatcaattttacccggaccgactttccagttttccagacctacacccgctgcggcatcagtacgctgcgttttccagtcaagcatctggatttcaattttcggcgcaccgtgtttacccacccagaaatcagcctctggcgcaaagggcaggaaacctttggtggtaacgtacatatcggagaactgcatatagttctcgccaccggcgttatcgccaaaccagccggtagagtactgctgaccaacgttaccatccatcatcacaacggcatcaacccgtttgccgttttcgttgtagacacgttgttttaactgcaaatcaaaccagccggagtattcgttaccaaagcggcccagagaaccaatcgcccaacttttaggactaccatgagaggcggtcccccaaccagaacggtaatagccgttgtaactaaagccaatttcatctttcacaaatttactgaaatctttcagagtcatggaagaataaatgctgcctgtctcactggcatttttctcttcatttttgaccagtacagcatcaggttttgcggcactactggtcgggaacggattggcggcatacccttgatcattcgtacttacgctacgattcaccgtcgctggcgtatactttttcttctcttcatctttatactttttgagttcgctttgcgtttctcttaacgccttttctaataactcaaggcgttgttccaccgttaaactttcagccaaactttgtgcagaaaaggctaacggtgccattaataagatggcagaggtaataagatttcgtctaaacataatatccctttatggtgcaaagaaagaattaacgcatcgcatccagactgttctgaatgcgacgataattaaggtgctttaatggttattttttttaaactcagcccccgcgtcttgatcacctctgcataccatccgaagcttttcttgcgtgttcttgtgaggcttccttcgccattatcatcacgatccacataaataaagccgtagcgcttagacatttgactatgagatgcactgactaaatcaattggcccccaactggtgtaccccataatatccacaccatcggcaatcgcttcatttacctgtaccaggtgatcgtttaaataggcaattcgataatcgtcctgtatgctaccatccgcttcaacgctgtcttttgcgcctaatccgttctcgacaataaataacggtttttgataacgatcccaaagcgtatttaacagaacccgtaatccaaccggatcaatttgccacccccactcactacttttcagatgcggattggggatcatattcagtatgttgccctgcgcatttttattaatgctttcgtcgtgggaaacacaaccagtcatgtaataactaaaagagatgaaatcgacggtatgttttaaatcttctgcgtcactttcagtcatctcaatggtgatattgtggtcgcggaagaaacgctgcatatagccgggatactggccacgcgcctgaacatcaccaaagaacatccagcgccggttctcttccatggcctgcaacatatcctgtggctggcaggtgagggggtaaaccagcccaccgagaagcatattgccgattttcgcttcggggagcaggctatgacaggctttaactgcccgcgcactggcaaccagttgatggtggatagcctgataaacttccgcctcgccactctcttctgccagccccacgcccgtgaatggcgcgtgtaagctcatgttgatttcattaaacgtcagccataacgccactttatgttggtagcgagtaaagaccgtgcgggcgtaatgctcgaagtgatcgatgaccgctcgattagcccaaccgccgtagtttttcaccagcccatatggcatttcgtaatgggataacgttaccagcggcttgatccccgcctgcgccatttcatcaaacagccgatcgtaaaacgctaaccccgcttcattcggttcgacttcgtcgccctgagggaaaattcgcgcccaggcaatggaaatacgcagacaggtgaagcccatctcggcaaataacgcgatatcttccgggtaacggtgataaaaatcgatggcgacatctttgatattctctttccccaggatgcgcggttccatttttcccattacgccatgaggctgtaaatcactggtgctgatccctttgccatcttcctgccaggcaccttccacctgattggcagctgttgcgccaccccaaagaaatgtttctggaaatgctttcataattaactccttttatcgttagcgaatgatggataacagcggttcacctgcgcttatctgcgccgtgccgtggggtaatacgtccgtaaaatcatcgctattactgattaataccggcgtcgtcagatcaaatccggcctcgcgaatagcagggatatcaaaagaaatcagccgatcgcctgtattgaccttgtcacccacgttgacgtgagcggaaaagaatttgccgtccagttttacggtgtcgataccgacatgaatcaggatctccacaccatcatcactctcaatgccaatggcgtgtaatgtggcgaacaagctagcaattcgacccgcaaccggagaacgcacttcaccaacgctgggcagaatggcaatacctttacccaacaggccactggcaaacgtggtatcagcgacgtgaatgagcggcacaatctctcccgtcatcggactacagataccgccctgctcaggtggtgtaataacctctggtgttttctcttgcggggcaccctgcgctggctgacgtttagcggtgatgaaatgaagcatcaccgtaccgacaaatgcgcaaccgatggcaatgacaccgccaataacgctggcccagacggtgaaatcaattcccgtactcgggatggtttgcatgaaggtgaaaatacttggcaaaccaaaggagtagactttcgtttgcgcgtagccaataatggtggccccccaaagccccactgatacaggcgataacaaaggggtacttacgcggcaggttgacgccatataccgctggttcggtgataccaaacagactcgtcaacgccgcacttcccgccaccacttttttctgcgcatcgcgttcgcagaggaagacgccgagcgccgccccgacctgcgccataatggcgggcattaacagcgggatcatggtgtcgtagcccagcacggtgaagttattgatacacagcggcaccaggccccagtgcagtccgaacatgacgaagatttgccagaagccgcccattaccgcgcccgcaaatgcaggaaccgcctgataaagccagagataaccggcggcaatcagttcgcttatccaggtacttagcggccccaccagcagaaaggtgacgggtgtgataaccatcagacatagcaatggtgtgaagaaatttttgattgcgctcggtaaccacgcattaagtcggcgttccagaatgctgcacaaccaggcagaaaaaataatgggaataacgctactgctgtaattcaacaatgtgaccggaatacccaggaaatccagccccagcgcatccgctttttgcccgttctcgaaagcagtcagaattaatggatgcactaacgctccaccaatcaccatggcagtaaatggattaccgccgaagcgtttccccgcggtgtatcccaggattatcgggaagaaccaaaacaaggcatcactggcgctgaataaaattaaataagtaccactttgttcggtcgtccactgaaaagtgagcgccagagccagcatacctttcaagatcccggttgccgccatcaaaccgatcagaggcgtaaaaataccactaataacataaacaaagcggtttagcagattacctttatcatcattttccggtgcctgttgcgctttttcgtcaaggcctgccacactgttaaccgccaggaagacatcggccacatggttacctatgaccacctgaaactggccaccgctttccaccaccataataataccgggggtctttttcagtacctctgcttgcgctttgctttcatcctttaatttaaaacgtaatcgcgttgcgcaatgcatcagactcacaatgttatctgcgcccccgactcctgcgactatttttctggctaactccgtcataacttgccctctaccgctttgcggcaaaactccaaaaaaaaacctgaaaaaaacggcctgacgtgaatcaagcaatttttttcaggttttgcccgcttagtgcggtaacaatcctttactcagtaataatatttcagtgttctttgcgcacgcgctctatatttatggctaaaaacataatctctgcgggactaattttacgttgatactgcaaaccaataaaaatggcgatccgttccgcacattgccatgcttgcgggtaattttgttttactgcttgttgtaaactttcatcactatcgttaatactagcatgttcaagaatacgccaggataaaaacttcagatgtgtaaccagtcgctgataactcaagctttcttcctggtaattaaggctgaactgaaattttattaattgcagcatttcgcgcattaactgcgtgacacctgcaacatcctccatatttccgctcatttgggcactgaccagatgcatggcaataaagcccacttcatctttcggtaactgcacgcccaaccgtttatcaataatggttaacgcttcttcccctagctggaactctttcgggtaaagccgctggatatcccacagcaacgggttgggcagcaacacgttttgctgaaagcgtttaatcgcaaactggcaatggtcagttaggctgatataaatactgtcctgtaattttcccaagcgctcctgcgctaaagagataatacgatcacaggttgccatcacctcaagaggaatatgacttaagagttcgcttaatcgcccgttcagttcatgactgctcaaggcatactctttttctattccactactgttaattctttcgccagcgcgtttttgaaagccaattccgcgccccatgacgactttttcccgctgttgatcatcaataaccaccacaacattattgttgagaattttggtgatttgcatgttcatagcaaggaccttttttataaacaaaaaaacccgacttcaccagtattctctggttatgtcaggttttgcctgcgaatgcagtaacaatccagtcatttattaatggtttttataacgaacatccaggttcggaaattaatttaattgcgtgcagagaaaatagcaatgcgctattgataaaaatatgaccatgctcgcagttattaactttgtgtaattttaggaatttataaagttatatataacaaatcccaataattaagttattgggatttgtctggtgaattatttgtcgctatctttccccgccagcagtttatccagctcatcgccaccgacgtgacggaaatcctgccccttcacgtagtagaagataaactcacaaatattctggcagcggtcgccaatacgttcgatagaacgcgcgcagaacagcgcagtaagtacgctcggaatggtacggctatcttccatcatgtaggtcatcagttgacgaacaataccttcgtattcctgatcgacttttttatcttcacgataaatacgtaccgcttcgtcaatgtccatccgcgcgaacgcgtccagcacgtcgtgcagcatctggatggtatgacggcccaggctctccagacttaccagcaacggctgatgctgctgggagaatttctccagcgcagtacggcagattttgtccgccacgtcgccaatacgctccagctcggcaatggttttactgatcaccataaccagtcgcaggtcgctcgccgtcggctgacgtttggcgataatgcgcacgcaggcttcatcgatcgccacttccatcatgttgacgttcttgtcgccttcgatgacgcgcttcgccagatcgctgtcctggttatgcatcgcggtgattgcatcagaaagctgctgctccaccatgccgcccatggtcatcacctgcgtgcggatactttccagttcggcgttgaactggccggaaatatgtttattaagattgagactgtccataacgcactcctgaatcaaccgtaacgaccggtgatgtagtcttctgtttgtttcttcgctggcttggtgaacagatcgtccgtgttgctgaactcaatcaattcgcccaggtacataaacgccgtgtggtcggaacaacgcgcagcctgctgcatgttgtgggtgacgatcaccacggtgtaatcctgcttcagttcggtgatcagctcttcaatacgcccggtagagatagggtcgagcgcgctacacggttcgtcgagcagcagcacttccgggcgaatggcgataccacgcgcaatacacagacgctgttgctgaccaccagagagagagtaaccgctctggtgcaatttatctttggtttcgttccacaatgcggctttggtcaatgcccactgcacgcgctcgtccatgtcggcacgggagagcttctcaaacagacgaacgccaaaagcgatgttgtcgtagatggacatcggaaacggcgtcggtttctggaacaccatgcccactttcgcacgcagcagtgcgatatcctgagagttggtcaggatgttgtcgccatcaagcagaatttcaccttccgcacgctgctccgggtacagttcaaacattttgttgaaggtacgcagcagcgtgcttttaccgcagccggacggcccgataaacgccgttacctggtttttagcgatatccaggttgatgtttttcagggcatggaatttgccgtagtagaagttcaaattacgaacctgaattttactcggggcagtttcaaccatactcattgcaatcttttcctcatcgtgcctgatgcacttcgctaatcaggcttaccgtaggccggatcaggcgttcacgccgcatccggcaaagtgttaaccgtgtacagagtcaaaaaggcgctcggtcggtcccctcgcccctctggggagagggttagggtgaggggaaaaccgtgtcagcaatatcaaccgtgtttattcttcgcaaaaacaacgcgcgccagaatgttcagcagcagtacgcacagggtaatgatcaataccccggcccaggccaattgctgccattccgcaaacgggctcatcgcaaacttaaagatcgtcaccggcaggttggcgatcggctgcatcatgtccgtgctccagaactggttggagagcgcggtaaacagcagcggcgcggtttcaccagcaatacgggcaatcgccagcaggataccggtcataatcccggacacgctcgctttcagcgtaatcgcagagatcatcttccacttcggtgtacccagcgcataagccgcttcacgcaggctgtacggcaccagtttcagcatgttctcggtggtgcggataacaatcggcacctgcaacaacgccagggcaatcacgcccgcccagccggagaagtgctccatctgcgccaccacaatggtgtaaacaaacagaccaaccacaatgctcggcgcagagagcagaatgtcgttaatgaagcgaatcacttctgccagccaggatttacgaccatattccgccagataaatccccgccataatgcccagcggcgtaccgaataccgtggcccacaaaattaacagcccgctacccgccagagcgttcgccagaccaccaccttccgtattgggcggcggcgtcatttcagtgaacagcgccaggctcataccgtcgataccgcgagtgatggtggacattaaaatccagatcagccagaacaggccgaaggccatcgtcgccatgctgagcgtcagcgcaatacggtttttgaggcggcgacgcgcctgcattttgcggcgagattcagccagcgccgcagtggtttgcatttcaaccatagccattagcgtgccccctcattcttagccaggcgcataatcataaacttgcttgcggcgaggacgatgaaggtaatcacaaacaggatcaggcccagttccatcagtgcggcaacgtgcagaccggattccgcttccgcaaattcgttcgccagcgcagaggtgatactgttgcccggcatatacaggctggcgctgtcgagctggtaggtgttaccgatgataaaggtcaccgccatggtttcaccgagcgcgcggcccagccccagcatgatgccgccgataacaccatttttggtgaacggaagaacgatacgccagataacttcccaggtggtgcagccaataccgtaggcgctctctttcatcatcaccggggtttgttcgaacacatcacgcattaccgccgcaatgtacggaataatcatgatggcgaggatcacgcctgccgcgaggataccgataccaaatgcggggccagagaacagcgcgccaacaatcgggatattgctcatgatattgccgaccggctcctgaaagtaaacggcgaacagcggcgcaaagataaacaggccccacatgccgtaaacgatacttggaatggctgccagcagctcaatggcgatacccagcgggcgtttcagccagccaggcgcaagctcagtcaggaacagggcgataccgaaactcaccgggacggcgatcagcagcgcgataaagctagtcaccaacgtaccgtagatcggcaccagcgccccgtagatatcgttcggtgcatcccactctttggtccataggaaagccagaccaaatttctgaatgctcggccaggaggagatgatcagagagacaataatgccacccaacatcaatagcacaatcagcgccgccagttttaccagcacgctgaaaattatgtcgccctttttacccggtgggttaaaagcaggcttggttgcagccataagttactcttcagttaaacgcgtttacaaagtcattttgtaatgccggatgcggcgtaaaacaccgtacccggcctggagttttattagtacagcggcttaccgctactgtctttaatattggtcttccacgcagcgcgaacctgttcaactacactatccggcaggctggcgtaatccaggtcgttcgcctgtttagccccggttttgtacgcccagtcgaagaatttcagcacttctgtgccttgttctggtttcttctgatctttgtggatcagaatgaacgtggtagaggtaataggccatgcatcttcgcctttctggttggtcagatcctgagcgaaggttttgctccagtctgcaccttttgctgcattagcgaagttttcttcggtcggactaaccggtttaccatcagcggagatcagtttggtgtacgccaggttgttctgcttcgcgtaagcatattcaacataaccaattgcacccggcagacgctgaacgaacgcggcgataccgtcgttacctttaccgcccagaccgatcggccattttacggtagagccagtaccaacgttgtttttccactcttcgttcactttcgccaggtagctggtgaagacgaaggaagtcccggagccatctgcgcggcgtactacagcaatgttttgactaggcagtttcagacccggattcagtttggcgatggcttcatcatcccacttcttgattttgcccaggtagatgtcgccgagggttttaccatccagcaccagttcgccagacttcagccctggaatgttaaccgccagcaccacgccgccaatcacggtcgggaactggaacagaccttcctgagccagtttttcgtcagacagcggcgcgtcagaggcaccaaaatcaacggtattagcgataatctgttttacgccaccggaagaaccgataccctggtagttaactttattaccggtttctttctggtaagtgtcagcccatttggcatacaccggcgcagggaaggttgcacctgcacctgtcaggcttgcttctgcaaacacagagaaagcactcatgcttaaggtcgcggcgacaacagttgcgacggtggtacgcataactttcataatgtctcctgggaggattcataaagcattgtttgttggctacgagaagcaaaataggacaaacaggtgacagttatatgtaaggaatatgacagttttatgacagagagataaagtcttcagtctgatttaaataagcgttgatattcagtcaattacaaacattaataacgaagagatgacagaaaaattttcattctgtgacagagaaaaagtagccgaagatgacggtttgtcacatggagttggcaggatgtttgattaaaaacataacaggaagaaaaatgccccgcttacgcagggcatccatttattactcaaccgtaacgctttttgccaggttacgcggctggtcaacgtcggtgcctttgatcagcgcgacatggtaagccagcagctgcagcggaacggtgtagaagatcggtgcaatcacctcttccacatgcggcatctcgatgatgtgcatgttatcgctacttacaaaacccgcatcctgatcggcgaagacatacaactgaccgccacgcgcgcgaacttcttcaatgttggatttcagtttttccagcaattcgttgttcggtgcaacaacaataaccggcatatcggcatcaattagcgccagcggaccgtgtttcagttcgccagcagcgtaggcttcagcgtgaatgtaagagatctctttcaacttcaatgcgccttccagcgcgattgggtactgatcgccacggcccaggaacagcgcgtgatgtttgtcagagaaatcttctgccagcgcttcaatgcgtttgtcctgagacagcatctgctcaatacggctcggcagcgcctgcagaccatgcacgatgtcatgttcaatggaggcatccagacctttcaggcgagacagcttcgccaccagcatcaacagcacagttaactgagtggtgaatgctttagtggatgccacgccgatttctgtacccgcgttggtcattagcgccagatcggattcgcgcaccagagaagaacccggaacgttacagattgccagactaccaaggtaacccagctctttgctcagacgcaggccagccagggtatccgcggtttcgccagactgactcaaggtgatcatcaggctgttacgacgcacggcagatttgcgatagcggaattcagaggcgatttcgacgtcgcacggaatacctgctaggctttcaaaccagtagcgggaaaccataccggagttataagaagtaccacaggcgaggatctgaatatgctcaaccttgctcagcagttcgtcggcgttcggtcccagctcgcttaaatcaacctgaccgtggctgatgcgtccggtaagggtgtttttgatcgcgttcggctgttcgtagatctctttctgcatgtagtgacggtaaatgcctttatcgcccgcgtcatattgcagattggattcgatatcctgacgttttacttccgcgccagttttatcgaagatgtttacgctacggcgagtgatttccgcaatatcgccctcttcaaggaagataaagcgacgggtcaccggcaacagcgccagctggtcagaagcgataaagttttcgcccatccccaggccaatcaccagcggactaccagaacgtgccgccagcagggtatccgggtgacgggagtccatgatcactgtaccgtacgcaccacgcagctgcgggatagcacgcagaacggcctcacgcagagtcccgccttgtttcagctcccagttcaccagatgggcaatcacttcggtgtcggtttcagaaacgaaggtatagccacgcgcttttagctcttcacgcagcggttcatggttttcgatgatgccgttatgcaccaccacaatgtgttcagaaacatgcggatgcgcattcacttcactaggttcaccgtgggtcgcccagcgagtgtgagcaataccagtgccgccatgcagaggatgttcttccgctgcctgtgccagcatctggactttaccgaggcgacgcaggcgggtcatatgaccttctgcatcaacaacggccagaccggcagagtcatatccgcggtattccagacgacgtaaaccttcaagaaggatttctgctacatcacgttgcgcgatcgcgccaacaattccacacatagtttttgattccgatttatatcgttgtcggtcaacctgtatgcccgttttttcgggcgccccgagccttgtagagagtggggttatttttatagttactgcttgtgggagggagattatgttatctcctcatcccatgtgaccgggttagccggccagaatcactttttctttaccggacgacgccagccttctttctgagtctgcggcacacggctgatagctaatgcattttcgccgacattacgcgtcacagttgtacccgcagcaatggtcgcgcctttgcctactgttaccggggccaccagctgagtgtcggaaccaacaaacacatcgtcgccgataatggtcttaaatttattcgcaccatcgtagttgcaggtaatggttcccgcgccgatgttaacgttatcgccaatttccgcatcgcccaggtaagtcagatgaccagctttgctgcctttacccagacgcgcttttttcatctcaacgaagttaccgacgtgagcaccttccagcaactcagcaccaggacgcaaacgggcaaacgggccaatggtacaggccgctgccagattcgcatcttccacaacggtatacggactgatttcgcaatcatcgccaatcacgctgtttttaatcacgcaaccggtgccaattttcacgcgatgaccgagagtcacgttgccctcgatgataacgttagtatcaatttcaacatcgcgcccgtgagttagcgtaccacgcagatcaaaacgcgctggatcgcgcagcataacgcctgctaacagcagtttttcagcctgttcggactgataaacacgctccagacgggagagttgcaggcggttattcacgccttctacttcgcttaaacgttgcggatgaacggcgacgatttcacgcccttcctgatacgccagcgcaataatgtcggtgatgtagtattcgccctgagcattattgttggtcagcttcgccagccagcgtttcatatctgcgccgttggcaatcagaatgccggtgttgatctcctgaatctgacgctgctcgtcggtggcatctttgtgctcaacaatgccggtaactttgccgttttcacgggtgatacgtccataaccggtcggatcatccagtttcaccgtcagcagaccaatgccaccctgcggtttagcatcacgcagacgctggagtgtttcgacagagatcagcggcacgtcgccgtagagcattaaaatgtcttcatcatcggcaaagaaaggtgcggcctgctgcattgcatgacccgtacccagctgctctgcctgaagcacccagttaaggttgtcgtctttcagcgcctgttttagcagatcgccgccgtgaccgtacaccaggtgaacgtgcgctgcgcctaattcattcgcagcatcaatgacatgctgaaccatcgctttcccggcaagggtatgcagcactttcggaagatcggaatacatgcgcgtgcctttgcctgcggcaaggatcactacgctcatagcattattcaacatacgcgtcctgactgtaatttgagaacgaatttaaaccgcttcaccttgaaaaaactacatttttttcatcgtgaaatggacagaggataaattgttcaataacggattatccccgctgacgaaagcgccattttcgaccatcgtcacgccttttgtctgcagaaaattaaggcagtaccttaatttaagcgtcaggtggatgtttttgctcttatttcgatcaatgaataaacaggaaaacaggggggttttatatcagcaggatctatgtgaacgctattcaggacgggtcacacgcgcaaaaaaaagccagcctgtttccagactggcttttgtgcttttcaagccggtgttacatcgcttttttggtcaactcgataacgcgcagctgcgcgatcgctttggccagttccgcagacgcctgagcgtaatctacgtcgccgtgagagctgctaatgtgctcttcagccttacgtttcgcttccatggctcgcgcttcgtcgagatcctggccgcgaattgcggtgtcggccagaacggtcacgttgccaggctgcacttcaagaatgccgccagacagatagataaactcttcgtgaccgtgctgtttcacgatgcgaatcataccaggcttaatggcggtgagcagcggtgcgtggccagggtagatccccagttcaccttcgctacccgttacctggattttctcgaccagaccagagaacatttgttgctctgcgctgacgacgtccaggtggtaagtcattgccatatcaccctccgattaaggcgttaaagttttttggctttttccacagcttcttcgatggaaccgaccatgtagaacgcctgctccggcaggtgatcgtattcgccttccatgatgcctttaaagccacggatggtgtctttcagggagacgtatttacccggagaaccggtgaatacttctgccacgaagaacggctgggacaggaagcgctggatcttacgagcacgcgctaccaccagtttgtcttcttcagacagttcatccatacccaggatggcgatgatgtctttcagttcctgataacgttgcaggatggactgaacgccacgcgcggtgtcgtagtgttcctgaccaaccaccagcgggtccagctgacggctggtggagtccagcgggtcaacggccgggtagatacccagagacgcgatctgacggctcagtaccacggttgcgtcaaggtgcgcaaaggtggttgccggagacgggtcagtcaagtcatccgcaggtacgtatactgcctgtacggaggtgatagaaccagttttggtggaggtgatacgttcctgcagaacgcccatctcttccgccagggtcggctgataacctaccgcactaggcatacggcccagcagtgcggatacttccgtaccggccagggtgtaacgatagatgttgtcaacgaacagcagaacgtcacgaccttcgtcacggaatttctcagccatggtcagaccggtcagagcaacgcgcagacggtttcccggcggctcgttcatctggccatacaccagggatactttgtcgataacgttggagtcggtcatttcgtggtagaagtcgttaccctcacgagtacgttcacctacgcccgcaaacacagagtaaccggagtgctcgatcgcgatgttacgaatgagctccatcatgtttacggttttacctacacccgcaccaccgaacagaccaactttaccgcccttagcgaacggacacatcaggtcgataactttgataccggtttccagcagttcctgagagttactcagctcttcgtaggaaggtgctgcgcggtgaatcgcccaacgctcttcttcaccgatctcgcctttcatgtcgaccggttcacccagtacgttcatgatacggcccagagtcgctttacctaccgggacttcaatcgggtgttcgaggtcttttacatccagaccgcgacgcagaccgtcggaggaacccattgcgatggtacgtacgataccgccgccgagctgctgctgaacttccagcaccagacgctcattaccattttgcacctcaagagcatcgtacacgcgcggtacggcatcctgagggaattcgacgtcaactacggcgccgattacctggacaatctttccagtagccatcttaaatcctctacgaaataacctgtttaaaccgcggcggccccgctgacgatctcggtgagttcctgagtaatgctggcctgacgagctttgttgtataccaactgcagctctttaatcaggctgccgccattgtcggtcgcggctttcatcgccaccatacgggcggcctgctcgctggccaggttttcaaccacgccctgataaacctgagattcgacataacgacgcagcagggtatccagcaacgccttcggatcgggttcgtacaggtaatcccaggatttatgtttcagatcatcatcatcacttgccggtaacggcagcagctggctgatggtcggaacctgagacatggtgttaataaatttgttgctgacaatgtaaagcttgtccagacggccttcgtcgtaggcctgcaacatcacttttaccggaccgatcagttcggacagggaagggttatcccccatgccggtgacctgggcaacaacattgccgcccacggagttgaagaagctcacgcctttgctgccgatcattgcgaggtcgcattgaacgcctttgtcggtccaggtcttcatttccgccagcagttttttgaacaggttaatgttcaaaccaccgcacaaaccacggtcggtgctcaccaccaggtagcccacgcgtttaacgtcgcggtcttccaggtaagggtgcttatattccagattaccgtgtgcaaggtgaccaatcactttgcgcatggtttctgcataaggacggctggccgccatgcgatcctggcttttacgcattttggaagcggcgaccatctccatcgctttagtgatcttttgcgtgttctggacgcttgcgatcttactacgtatctcttttgcgccggccatgagcttctcctcaatgccttgcggcctgccctaaggcaagccgccagacgttaccaggattgggttgctttgaaggaatcgaggatgcctttcagcttgccttcgatttcgtcgttgtagccaccggtctggttgatctcttgcatcaacggagcgtgatcacggtcgacgtaagccagcagagcggcttcgaagctgccaattttgctcagttcaacatccgccaggtaaccacgttctgctgcgaacagaaccagagactgctgcgcaacggacatcggcgcatactgtttctgtttcagcagttcggtcactttctgaccgtggtcaagctgcttacgtgttgcatcgtcaaggtcggatgcaaactgagagaacgctgccagttcacgatactgtgccagagcggtacggataccaccggacagttttttcatgatcttggtctgtgctgcaccaccaacacgggatacggaaatacccgggttaaccgcaggacgaataccggcgttgaacaggttggtttccaggaagatctgaccatcggtaatggagattacgttggtcggaacgaacgcagaaacgtcacccgcctgagtttcgataatcggcagtgcggtcagagaaccggttttccctttcacttcacctttggtgaaggcttcaacgtattcggcgttaacacgtgcagcacgctccagcagacgagagtggaggtagaaaacgtcgcccgggaatgcttcacgtcctggcggacgacggagcagcagggagatctgacggtaagcaacagcctgtttagacaggtcatcgtaaatgatcagcgcatcttcaccgcggtcacggaagtattcgcccattgcgcaaccggcatacggtgccaggtattgcagtgcagcggattcagacgcggttgctaccacaacgatggtgttagccagtgcgccgtgctcttccagtttacgtaccacgttagaaatggtggacgctttctggccgatagcgacatagatacatttgataccggaatcgcgctggttgatgatggcatcgatagccagtgcggttttacctgtctgacggtcaccgatgatcaattcacgctgaccacgaccgattgggatcatggagtcaacggctttataaccggtctgtaccggctgatctacggactgacgttcgataacgcccggagcgattgcttctacagcagagaagccgtcgtgatccagcggacctttaccgtcgattggtgcacccagagtgttaaccacacggcccagcaggccacggccaaccggaacttccaggatacggccagtacacttaactttcatgccttcggcaaggtcagcgtacggacccataacaaccgcacctacagagtcgcgctcgaggttcagtgcgatagcgtaacggttacccggcagggagatcatttcaccctgcatacaatcggccaggccgtgaatgcggataacaccgtcacttacagaaacaatagtaccttcgttgtgagcttcactcacaacattgaactgagcaatgcgctgcttgatcagttcgctgatttcggtggaattcagttgcatgctccagtccccttaagactgcaagacgtctgcaaggcgctcaagacgaccgcgtacgctgccatcaatgaccatatcacccgctcggatgataacgcctgccattacagacttatcgattttgcaattcagcttaactttgcgactcagacgtttttccatcgcagcagaaattttcgcgagctgttgttcactcagtgcggcagcggaaatgacgtctacctcagcggtagcctcactcacggcacgcaggtgaataaactgctccagaacatccgggagcgcgttaagacgaccattttcagccataacccgaatcaggttctgaccgttttcgtccagttgctcaccacaaactgcgataaagctctcggcgagcgtttctggcgcaagcgcgccagagagaagctctgccatttgttcgtttttggttacctcggcggcaaacgccagcatgtcctgccagcgttctacactttggtgttcgacggcaaagtcaaaagctgctttggcgtaggggcgagctaccgtaataaattcagacatcagcccctccctccttacagttcagcgacaagtttatccacgatgtcgctgttagcagcttcatccacggaacgttcgatgatcttctcggcgccagcaacagccaggatagcaacttgcttacgcagctcttcacgggcacgtttacgctcggcttcaatttccgcctgcgcctgggccacgattttagtacgttcctgttctgcctcagctttcgcttcgtccagaatctggctgcggcgtttgttcgcctgctcgatgattacctgggcttccgctttcgcttttttcagctggtcggtcgcgctggcctttgcaaggtcaaggtccttatgtgctcgttctgcggaagcaaggccgtcagcaatttctttttgacgtttttcgatggctgccattaatggcggccatacgtacttcatgcagaacagaacgaacaggacaaacgcgatggcctggccgaggattgttgcgttaagattcacagcacaatgcctctatttagttaacgttctgatattgctctttaaataaaagcaacgcttattacgcgacagcgaacatcacgtacagacccagacctacagcgatcatcgggatagcatccaccagacccataacgataaagaactgagtacgcagcagaggaatcagatcaggttgacgcgctgcgccttccaggaatttacccccgaggatgccgataccgatcgcagcaccgattgccgccagacccatcatcacagcggcagccatgtacagcagatccatattcaggttttccatgacagtctccagtttgtttcagttaaaacgtagtagtgttggtaaattaatgttcttcagacgccatgctcagatagacgatcgtcagaaccatgaagatgaaggcttgcagcgtaatgatcaggatgtggaaaatggcccacggcacattcaggatccactgactccaccacggcaacagaccagcaatcagaatgaaaatcagctcaccggcatacatgttaccgaacagtcgcaaaccgagactaactggtttggacagcaggcttaccccttcaaggattaagttgacaggaatgaacgcccagtgattgaacggctgcagcgtcaactctttcgtgaagccgccgatgcctttcattttgatgctgtagaacagaatcaggataaatacgcccagtgccatagacagcgttacgttcacgtccgcagacggaaccacacgcagtgcaggcagacccagtacatgttcagcaatgtacggcagcaggtcgataggcagtaaatccatcaggttcatcaggaatacccagacgaagatcgtcagggccagcggagcaatcagcttgcttttgccatggtacatgtctttcacgctaccattaacaaagccgatcaccagctcaatcgcggtctgaaacttacctggcacaccgctggtcgcctttttggctacgctacggaataaaaccaggaacaacagacccagcaccacgctgaagaacatggagtcaatattgattgtccagaaggtggctggggggttttgtggatccaccaggctgaatgtacgcaggtccagctgaaggttattcaggtggtgtcctatgtaatcctgcggcgtcatattttcactagccatgatgccttttaccctttgttgttaattacagccggtgccagtatctgaaccaccagcaccaaaacccacgtaacgatcagcggcaagaataccgcctttaaaaccgccaacgccaccaccagtaacaccaacatcgccagaactttgaaagcttcgccaaatgcgaatgtccaggccacccggcctttcgctggtgtatgcgcctggtgacgccaggcaaatatcataaacaaaacgttaggcagaaagactgccaggcccccgcttattgcagagacgccccagaaggggtctttgaggctgaacagcaatccacttgctatcaccaccagtaactgaacgagcagaagcttccgagcaacgtttcgactcacgaggctcacagacatcacgtttttcactcctgctcccttcgaggtatgccgcgtgtcgtataaaactttctttaaggcttagagtcaagcatcaaaaagcggtcaaattatacggtgcgcccccgtgatttcaaacaataagtagccaaaaggtgaataaatgtttaaatatttttccagtgcatacaattgcgacttttctgctaaccctgttcgatcatgaaaaactgtaaataacgcgtaaacactggtgataaagcgtgcttcagatcacatattgcgcatgttcgcgcacagcatatttatttacttggcaaatgatgcctttgcaagtttatgatatttcagtctaaaaacagatactgttttaataaatgacatttacacaacaaaaaccacccattgacatttttaataatgttttaacagccaatgatggttcttagcgccgatttttagcagactgatattttcactaatgacttattttctgcttaccaaaaaaagccacgttatcttgttgatgcaaaagagtgaacgtggcgttaaatgtaaccagttatatcagtagaaaacctggttgttgttaacagtctaaccggtcaattttttatgatttttttgataaaaattaaattttatttgctttaatcaccaccagatgacgttcgccatccagggctggaacctgaagtttaaccacactttcgacctgatattcttcgggcaacaaagcgatttcatcttccggcatttgccctttcagcgcgtagaaacggccttgctcaccaggaagatggtggcaccagctcaccatatcgttcagagaggcaaaagcgcggctaattacgccatcaaatggcggctcactaggaaactcttctaccctgctctgtactggttcaatattctccagtttaagctcatgttgcacctgacgaaggaaacgcacgcgtttaccaaggctatccaacagagtgaaatgggcttcaggacgcacgatagagagtggaatgcctggcagtcctggtccggtgccgacatcgataaaccgttcaccttgcagatacggtgccaccacaatgctatcgagaatatggcgtaccagcatctcattaggatcgcggacgctagtcaggttgtacgctttgttccatttatgcagcatattcacgtaggcaataagctggtttttctggtgatcggtaaggctaatacctgcgtctttcagcagtaaggagagtttgttgagcacggtgattacctgttcttgatgcgttgcctggtaagcgggtgcttaccaggcatttttaatgcgttatgcgctacgacgcagcataccctgttttttcagccacaccagcagaatggagatggccgcaggcgtgacgccagaaatacggctagcttggccgatagaggctggtttgtgatcgttaagtttggcgatcacttcgttagaaagaccggatacctggcggtaatccagtgtcgcgggtagcagggtgttctcgttacgcagctgcttttcgatctcatcttgctggcgcgcgatataaccttcgtatttaacctgaatctcaacctgttccgccgcctgttcgtctgtcaacgcaggggcaaacggcgtcagcgtggttaatttttcataagtcatttccggacgacgcagcagatcttcaccactggcttcacgggaaagcggcgcagtcaggtgagcattcacttcggctgcagcttccgcgctcggggttacccaggtgcttttcagacgctgacgctcacgctcgatattctcaagtttctcgttaaagcgcgcccaacgttcgtcatccaccaggcccagttcacgaccgatttcagtcaaacgcagatccgcattatcttcgcgtagcatcagacgatattctgcgcggctagtaaacatacgatacggttctttggttcctaaagtgcacaggtcatcaactagtacgccgagatacgcctgagaacgtgccggagcccaaccttctttgtcagcagacagacgggcagcgttaagaccggccagcaaaccttgcgcagcggcttcttcgtaaccggtagtgccgttaatctgaccagcaaagaacagcccctggataaacttgctctccagcgtcggtttcaggtcgcgaggatcgaagaagtcatactcaatggcataacccggacgcacgatcttcgcgttttccatcccctgcatagagcggacgatttgcatctgcacatcgaacggcaggctggtggagataccgttcggataaatttcattagaggtcagtccttccggttcaaggaagatctgatgctgatttctgtcggcgaagcgcatgactttgtcttcgatgctcgggcagtagcgtgggccgacaccttcgatcacccctgcgtacattgggctacgatcgaggttactgcggatcacatcatgggttttctcgttggtatgagtgatataacacggcacctgctggggatgctgggacgcattgcccataaagctgaataccggcattgggttatcgccatgctgttgcgccagtacgctaaagtcgatggttcgagcatcaatacgcggtggtgtcccggttttcagacgaccaacgcgcagcggcagttcacgcaaacggcgagaaagcggaatggacggcggatcaccagcacggccaccgctgtaattatccagaccgatatgaattttaccgtcgaggaacgtcccaacggtgagcacgacggctttggcacggaacttcagtcccatttgggtaacagcaccgaccacgcgatcgttttcgacaataagatcttcaaccgcctgctggaagatcatcaggttcggttggttctccagcgccgtacgtaccgcctgacggtagagcacacgatccgcctgagctcgggtagcgcgaaccgccggtcctttgcttgcgtttagtatcctaaactggatacccgcctgatcgatcgctttcgccatcagaccgccgagtgcatccacttcttttaccagatgtcccttcccaataccgccgatcgccgggttgcagctcatctgccccagagtgtcgatattgtgtgtcaaaagcagagtctgttgacccatacgcgccgcggccatcgcggcctcggtgcctgcatgacccccgccaatgatgatgacgtcaaaaggatccggataaaacatggtgattgcctcgcataacgcggtatgaaaatggattgaagcccgggccgtggattctactcaactttgtcggcttgagaaagacctgggatcctgggtattaaaaagaagatctatttatttagagatctgttctattgtgatctcttattaggatcgcactgccctgtggataacaaggatccggcttttaagatcaacaacctggaaaggatcattaactgtgaatgatcggtgatcctggaccgtataagctgggatcagaatgaggggttatacacaactcaaaaactgaacaacagttgttctttggataactaccggttgatccaagcttcctgacagagttatccacagtagatcgcacgatctgtatacttatttgagtaaattaacccagcttcccagccattcttctgccggatcttccggaatgtcgtgatcaagaatgttgatcttcagtgtttcgcctgtctgttttgcaccggaatttttgagttctgcctcgagtttatcgatagccccacaaaaggtgtcatattcacgactgccaataccgattgcgccaaagcggactgcagaaagatcgggcttctgttcctgcaatgcttcatagaaaggagaaaggttgtccggaatatctccggcaccgtgggtggagctgataaccagccagatcccactggcaggtaaatcttctaacagcggaccgtgcagcgtttcggtggtaaaacccgcctcttccagcttttcagccaggtgttctgctacatattcggcaccgccgagggtgctgccgctgataagagtgatatctgccataaaccgccacctttattaagagtggcgtattgtacgctgtgaacgcgttgggatctacctgtggaaaagtatgggattaaaaaagccgatcagggcttgatggtacgcatgatcgggttttgcaggacgatcaatgtctcggtggactgaatttcatcaattgtttggatcttgttgataagtacatgctggagagcgtcgatgctacggcacatcacttttataaagatgctgtagtggccggttgtgtaataggcttcagtgacttcatcaaggctttccagctttgccagcgcggaagggtagtctttggcgctctttaatataatgccgataaagcagcctacgtcataaccgagctgcttcgggctgacatcaatacgcgccccggtaatgatccccgcctgcttcattttctctactcgaacgtgaatcgtccccggactgacgccaaattgtttcgccagttcggcgtaagcggtgcgcgcattgcccattaatgcttccaggatgccacggtccagattgtcgatcagataattttccataggattttcttatgcggattgatgattcattctattttagccttcttttttaatgaatcaaaagtgagttaggctttttattgaatgattattgcatgtgtgtcggtttttgttgcttaatcataagcaacaggacgcaggagtataaaaaatgaaaaccgcttacattgccaaacaacgtcaaattagcttcgtgaaatctcacttttctcgtcaactggaagaacgtctggggctgatcgaagtccaggcgccgattcttagccgtgtgggggatggcacgcaggataacttgagcggctgtgaaaaagcggtgcaggtaaaagtgaaagctctgcctgatgcccagttcgaagtggttcatagtctggcgaagtggaaacgtcagaccttagggcaacacgacttcagcgcgggcgaagggctgtacacgcacatgaaagcccttcgccccgatgaagaccgtctttctccgttgcacagcgtctatgttgaccagtgggactgggaacgcgtaatgggcgacggtgagcgtcaattcagcactctgaaaagcacggtagaggcgatctgggcgggaattaaagcaaccgaagctgcggttagcgaagagtttggcctggcaccgttcctgccggatcagatccacttcgtacacagccaggagttactgtctcgttatccggatcttgatgccaaagggcgtgagcgggcgatagcgaaagatcttggcgcggtattccttgtcgggattggcggcaagctgagcgatggtcatcgccacgacgtgcgcgcaccggattatgatgactggagcaccccgagtgagctgggccatgcgggtctgaacggcgatattctggtgtggaacccggtactggaagatgcgtttgagctttcctccatggggatccgtgtagatgccgacacgctgaagcatcaactggcgctgaccggtgacgaagatcgcctggagctggagtggcatcaggcgctgctgcgcggtgaaatgccgcagaccatcggcggcggtatcggccagtctcgtttgactatgctgctgctgcaactgccgcatatcggccaggttcagtgtggagtatggccagctgctgttcgcgagagcgtcccttctctgctgtaataatttatcgccgccagcgtctgagcaggcggcttcgcatcccggtatcaaagcgccagatatgatcgaaaatgcgcatgatgccgggtttgccgtgtgcgctcatcgccacggcatgaaagcgatgctgatgtacccgctgcagctctttcactttactcgtcacgtcgtcaggcaaccgctgagcgataaaatcagaaatcaccaccgcatcggcatcaaaccattccctgctttgcaagcgttccataatggcgcgaaaacaactggcaagatcggtgccgccacgaaactgctggcttaaaaaacggattgcttgttcgatgccttgtgggccactaagctcataacggacgatctcggtggaaaatagcataatatagcagcgccggttttctgcgagagcaatgcgcatcaaggccaggcagaacgctttcgcacactgttcattaaagccgcccatactgccggaagtatccacacagacaataaacggcccgcgcggctgttcatcgtaatctttatgtaccaccggacgttcgatcactttttcacgccagctctcaccgtgcaggcgataggtgagcaactgtttttccaccagccgacggtaaaactcatactccagttccgttatccctagtgtcgccagttctggcggcaggagacgtaaaatatcatcgctttgttgcagaccatcaacctgctcaggaaccgtcgccggttcgcgcaccatggtgcggaaggtttccatctgcgcatcgttgcgcggtatacttttggcttcccgagaacgccccagctgctctgccaggcgtttcagttccggctgttcgttaagaaattcaccgtatttcacaatcaactgatagtcgccacgtttaagctgaccggcgctcatatcccacagacgaccagctgcagtattgttatctgcgagaatcggttcaagttgtccgctcagcgtcatgcgttcctgaacttcactcaacagttgttcgcgttcttcttctaatagctgttgatttaacgtcgttgcttgcacgatcagacttaaacgccaacgctggagaaaaagcgtgtgtaacgcactagtgatcgtgctgttagcatcaaccaactgtcgggcttgttctgcccatggagaattcagacgatgcagtaagtccaggatctgtggtagctgcacaataaactgtggcgtggagaggagctggctttgctgatagcacatcacctcttcggtgagttccggcgggactcgggcatctttcagccgactgcgcagcgcttcacgccagcggggaacatcatcagtgattgccgccttcaggcgtgggaatttttcaaagaagaccgccagctgcggactggccagcagtgcgatgatcatctcttcgatcaatccctcttcgctgacggccagcatcacattaagcgtatccagcgttagcattgttgtgcctggcgaatctgtgcaccgacatcctgtaggctggcttcaatgcgacctaaccagtcgccagggataaacagacatttttgctgttcgctgaataaagcgtgttgcttgcgccagtcgctttcaagctcttccagttgttgttttatttcaccaggcagaccttcagcgctactaccgggaagtgccagcgtactgccttgtaaacttacatcgcgaacgacaagatgttgggcgctatcaacttccagattcagtttctgggcaaagccgataccgttcagtttaccgcgaatttcaccacctttgctcagccactgttccagcgcgctacgctcaaaggagatatgaaccacttccatatcatgcagttttaacggtttttgcagcagtagagtcagagtggaagcagtaacgttaacaggaagttgatactgctgacgacggctgaaaatgccgcccagacgaattaccgttaaggctgttttatcgctttgttgctgctggagttgcaggtgacgttgcacaatcgcgccaaggcgagtcaacatcccttgctgttgccaggcgtgaccggtcatcaatacatcaatttgttgttgtatcaaattcaggctttgcgcgtcataccacaggcaatctttcagcaaaatgagatctaccggggcaacagcactgcgaccgctaaaaaaggcgctggcctgcaataatcggatcgcttttttccagcgacgatcgctgacataaggcgcatccggtaatttatccagttgctggcgcagcataaaaatcagctcaaatacatgatcgggcagcgtaatttcaccaatctctttctgccagcgttcatattcttcatctgtgacctgcaaggcatcaggaaccggattgtcgttttcatcctgttgactggtcagcatggagcggaaattcgctttatcctgcactttatctaaccacagacgaatcagcatgcggtcatataacgcttccagactgctgtctgcttccggcagctcgttggaggccgccaccagcagacgcatcgggattttttctacgtgtgcaccgttgcggaactggcgctcgttaatggcggtgagcaaggtattaagaattgccgggcccgctttccagatctcatccagaaagacaatttctgcttccggcaggtaaccgctggttaaacgttcatagcgcccttcatcttttagcgcctgaatagaaaggggaccaaaaacttcttccggcgtggagaagcgggtcatcagatattcaaacgcgcgggcattctgaaaggcgaattttaagcgccgggcgatcaaacttttggcaatacctggcgggccaaggaggaacacactttcaccacttaatgccgctaataaacacaagcggatggcgtggctacgttcataaagccccttttccaagctactgctcaggcgggaaattctttccgctaataaatgagggtgagccataatgaagtggcgtcctttcgtcaaaagttctgcgtaaattgcgagtatagacgtttcttgctggtggctaaaatagtctcaaagggggggtatttttctttgagccaggttaatgtggccgcatttaggagtacgattttgccgttaatcgtgcatactgtgcgcttttttgtgggccaagggactaagcacacatttcatatttcaacgaaagactagtctatgagcactgataataagcaaagtttgcccgcgattaccctcgcggcgattggagttgtctacggcgatattggtaccagcccgttatatacacttcgtgaatgtttgtccggccagtttggttttggcgttgaacgcgatgccgtgtttggctttttaagcctgatcttctggctgctaatctttgtggtttccattaaatatctcaccttcgtgatgcgggcagataacgccggtgagggggggatcctgacgttgatgagccttgccgggcgtaatacgagcgcgcgaaccacaagtatgctggtgattatggggctaatcggcggcagctttttctatggtgaagtcgtcataacacccgctattagcgtgatgagtgccattgaaggtctggaaatcgtcgccccgcagctggatacctggatagttcccctcagtattatcgttctcactttattatttatgattcaaaaacatggcacggctatggtcggtaagctgtttgcgccgatcatgctgacctggtttttgattctggcaggactggggttacgtagcattattgctaacccggaagtgctgcatgcgctgaatccaatgtgggcggtgcatttcttccttgaatacaaaacggtttcttttattgcattaggggcagtggtgttgagcattacgggggtcgaggcgctgtatgctgatatggggcactttggtaagttccctattcgcctggcgtggttcaccgtcgtattaccttccttgacccttaattacttcggtcagggagcgctgttgttaaagaacccggaagcgattaagaacccgttcttcctgttggcaccggactgggcgctgatcccgctgctgatcatcgccgcactggcgacggtaattgccagccaggcggttatctctggcgtcttcagtttgacgcgtcaggcggtacgtctgggatatttgagcccgatgcgcattattcacacctccgaaatggagagtgggcaaatctatattccgtttgtgaactggatgctctatgtcgcggtcgtgattgtgattgtcagctttgagcactccagcaacctggcggcggcgtacgggattgcggtgaccggaaccatggtgctgacgtctattctcagcactaccgtggcacgtcagaactggcactggaataagtattttgttgcgctgatcctgattgctttcctttgtgtcgatattccattgttcaccgctaacctcgataaactgctctccggcggctggttgccattgagcctcggtactgtgatgtttatcgtgatgaccacctggaagagcgagcgtttccgcttgctgcggcggatgcatgaacatggtaactctctggaagcgatgattgctagcctggagaaaagtccgcctgttcgcgtgcccgggaccgcggtgtatatgagccgtgcaatcaacgtcattccctttgcgctgatgcataaccttaaacataacaaggtattgcatgagcgggtgattctgttaactctgcgcaccgaagacgctccatatgtccataacgtccgtcgggtacagattgaacaactgagccccactttctggcgcgtggtggcaagttatggttggcgagaaacgccaaacgtagaagaagttttccaccgctgcggtctggaaggattaagttgccggatgatggaaacctccttctttatgagccatgagagcttgatcctcggcaaacgcccgtggtatttgcgtctgcgcggcaagctgtacttgctgctgcaacgtaatgcgctgcgtgcaccagatcaatttgaaatcccgccaaacagggttatcgaactgggtactcaggtcgaaatctaacgccagacgcctcctttcttcataagggggcgtttttgttttcatggttaatcaccatgtaaaacgtttcgaggttgatcacatttccgtaacgtcacgatggttttcccaactcagtcaggattaaactgtgggtcagcgaaacgtttcgctgatggagaaaaaaatgaaaaaaggcaccgttcttaattctgatattagtagcgtgatctcccgtctgggacataccgatacgctggtggtgtgtgatgctggtttacccatccccaaaagtacaacgcgtatcgatatggcattaacccagggtgtaccttcttttatgcaggtgctgggcgtcgtcacaaatgaaatgcaggtcgaggcggccattatcgcggaagagatcaaacaccataatccgcaactccacgaaacgttgctcactcaccttgagcagctgcaaaaacaccagggaaataccattgaaattcgttacaccacgcatgaacaattcaaacaacaaaccgcagaaagtcaggcggtaattcgcagcggagaatgttctccgtatgcgaatatcattctctgtgctggcgtgacgttctgaggccgtcatggaagcattacttcagcttaaaggcatcgataaagccttcccgggcgtaaaagccctcagcggcgcagcgttaaatgtctatccgggccgcgtgatggcgctggtgggcgaaaacggcgcgggtaaatccaccatgatgaaagtgcttactggcatctatactcgcgatgccggtacgcttttatggctggggaaagaaacgacatttaccgggccaaaatcttcccaggaagccgggattgggattatccatcaggaactgaacctgatcccgcagttgaccattgccgaaaacattttcctcggtcgtgagtttgttaatcgctttggcaaaattgactggaaaaccatgtatgccgaagcggataaattgctggctaaacttaacctgcgctttaaaagcgacaagctggtgggcgatctttccatcggtgaccagcaaatggttgaaatcgccaaagtgctgagctttgagagcaaagtcatcattatggatgaaccgaccgatgcgctgaccgataccgaaaccgaatccctgttccgcgtcatccgcgagctgaaaagccaaggccgcggtattgtctatatctcccaccgcatgaaagaaatcttcgagatttgcgatgacgttaccgtttttcgtgatgggcaatttattgctgagcgcgaagtggcaagtctgaccgaagatagcctgattgagatgatggtgggtcgcaagctggaagatcaatatccgcacctggacaaagcgccgggagatatccgcctgaaagtcgataatctctgcggacctggcgttaacgatgtctcttttactttacgcaaaggcgaaattcttggcgtctctggtttgatgggcgcaggtcgtaccgaactgatgaaagtgctctacggcgcactaccgcgcaccagcggttacgtcaccctggatgggcatgaagtcgttacccgtagtccgcaggatggcctggcaaacggcattgtgtatatctccgaagaccgtaaacgtgacggtttagtgttgggcatgagtgtaaaagagaacatgagcctgacagcgctgcgctacttcagccgcgctggcggcagtttgaagcatgccgatgaacagcaggctgtgagtgatttcattcgtctgtttaatgtgaaaactccgagcatggaacaggcaattggtctgctttccggtggcaatcagcaaaaagtggcgattgcccgcggtctgatgacacgccccaaagtgttgatccttgatgaacctacccgtggcgtagatgtcggcgcgaaaaaagagatctatcaactgattaaccagttcaaagccgatggcttgagcatcattctggtgagtagcgagatgccagaagtattaggcatgagcgatcgcatcatcgtcatgcatgaagggcatctcagcggggaatttactcgtgagcaggccacccaggaagtgttaatggctgccgctgtgggcaagcttaatcgcgtgaatcaggagtaaaaaaatgacaacccagactgtctctggtcgccgttatttcacgaaagcgtggctgatggagcagaaaagccttatcgctctgctggtgctgatcgcgattgtcagcacgttaagcccgaactttttcaccatcaataacttattcaatattctccagcaaaccagtgtgaacgccattatggcggtcgggatgacgctggtgatcctgacgagcggcatcgacttaagcgtaggttctctgttggcgctgaccggcgcagttgctgcatctatcgtcggcattgaagtcaatgcgctggtggctgtcgctgctgctctcgcgttaggtgccgcaattggtgcggtaaccggggtgattgtagcgaaaggtcgcgtccaggcgtttatcgctacgctggttatgatgcttttactgcgcggcgtgaccatggtttataccaacggtagcccagtgaataccggctttactgagaacgccgatctgtttggctggtttggtattggtcgtccgctgggcgtaccgacgccagtctggatcatggggattgtcttcctcgcggcctggtacatgctgcatcacacgcgtctggggcgttacatctacgcgctgggcggcaacgaagcggcaacgcgtctttctggtatcaacgtcaataaaatcaaaatcatcgtctattctctttgtggtctgctggcaagcctggccgggatcattgaagtggcgcgtctctcctccgcacaacccacggcggggactggctatgagctggatgctattgctgcggtggttctgggcggtacgagtctggcgggcggaaaaggtcgcattgttgggacgttgatcggcgcattaattcttggcttccttaataatggattgaatttgttaggtgtttcctcctattaccagatgatcgtcaaagcggtggtgattttgctggcggtgctggtagacaacaaaaagcagtaataacgactacaggacatcttgaatatgaacatgaaaaaactggctaccctggtttccgctgttgcgctaagcgccaccgtcagtgcgaatgcgatggcaaaagacaccatcgcgctggtggtctccacgcttaacaacccgttctttgtaagcctgaaagatggcgcgcagaaagaggcggataaacttggctataacctggtggtgctggactcccagaacaacccggcgaaagagctggcgaacgtgcaggacttaaccgttcgcggcacaaaaattctgctgattaacccgaccgactccgacgcagtgggtaatgctgtgaagatggctaaccaggcgaacatcccggttatcactcttgaccgccaggcaacgaaaggtgaagtggtgagccacattgcttctgataacgtactgggcggcaaaatcgctggtgattacatcgcgaagaaagcgggtgaaggtgccaaagttatcgagctgcaaggcattgctggtacatccgcagcccgtgaacgtggcgaaggcttccagcaggccgttgctgctcacaagtttaatgttcttgccagccagccagcagattttgatcgcattaaaggtttgaacgtaatgcagaacctgttgaccgctcatccggatgttcaggctgtattcgcgcagaatgatgaaatggcgctgggcgcgctgcgcgcactgcaaactgccggtaaaagcgatgtgatggtcgtcggatttgacggtacaccggatggcgaaaaagcggtgaatgatggcaaactagcagcgactatcgctcagctacccgatcagattggcgcgaaaggcgtcgaaaccgcagataaagtgctgaaaggcgagaaagttcaggctaagtatccggttgatctgaaactggttgttaagcagtaattttaatcaggttgtatgacctgatggtgacataaatacgtcatcgacagatgaacgtgtaatataaagaaaagcagggcacgcgccaccctaacacggtggcgcattttatggacatcccgaatatgcaaaacgcaggcagcctcgttgttcttggcagcattaatgctgaccacattcttaatcttcaatcttttcctactccaggcgaaaccgtaaccggtaaccactatcaggttgcatttggcggcaaaggcgcgaatcaggctgtggctgctgggcgtagcggtgcgaatatcgcgtttattgcctgtacgggtgatgacagcattggtgagagcgttcgccagcagctcgccactgataacattgatattactccggtcagcgtgatcaaaggcgaaagtacaggtgtggcgctgatttttgttaatggcgaaggtgagaatgtcatcggtattcatgccggcgctaatgctgccctttccccggcgctggtggaagcgcaacgtgagcgtattgccaacgcgagtgcattattaatgcagctggaaagtccactcgaaagtgtgatggcagcggcgaaaatcgcccatcaaaataagactatcgttgcgcttaacccggctccggctcgcgaacttcctgacgaactgctggcgctggtggacattattacgccaaacgaaacggaagcagaaaagctcaccggtattcgtgttgaaaatgatgaagatgcagcgaaggcggcgcaggtactgcatgaaaaaggtatccgtactgtactgattactttaggaagtcgtggtgtatgggctagcgtgaatggtgaaggtcagcgcgttcctggattccgggtgcaggctgtcgataccattgctgccggagatacctttaacggtgcgttaatcacggcattgctggaagaaaaaccattgccagaggcgattcgttttgcccatgctgccgctgcgattgccgtaacacgtaaaggcgcacaaccttccgtaccgtggcgtgaagagatcgacgcatttttagacaggcagaggtgacgcttggctacaatgaaagatgttgcccgcctggcgggcgtttctaccagtacagtttctcacgttatcaataaagatcgcttcgtcagtgaagcgattaccgccaaagttgaagcggcgattaaagaactcaattacgcgccaagtgctctggcgcgtagcctcaaactcaatcaaacacataccattggcatgttgatcactgccagtaccaatcctttctatagtgaactggtgcgtggcgttgaacgcagctgcttcgaacgcggttatagtctcgtcctttgcaataccgaaggcgatgaacagcggatgaatcgcaatctggaaacgctgatgcaaaaacgcgttgatggcttgctgttactgtgcaccgaaacgcatcaacctagccgtgaaatcatgcaacgttatccgacagtgcctactgtgatgatggactgggctccgttcgatggcgacagcgatcttattcaggataacagcttgctgggcggagacttagcaacgcaatatctgatcgataaaggtcatacccgtatcgcctgtattaccggcccgctggataaaactccggcgcgcctgcggttggaaggttatcgggcggcgatgaaacgtgcgggtctcaacattcctgatggctatgaagtcactggtgattttgaatttaacggcgggtttgacgctatgcgccaactgctaagtcatccgctgcgtcctcaggccgtctttaccggaaatgacgctatggctgttggcgtttaccaggcgttatatcaggcagagttacaggttccgcaggatatcgcggtgattggctatgacgatatcgaactggcaagctttatgacgccaccattaaccactatccaccaaccgaaagatgaactgggggagctggcgattgatgtactcatccatcggataacccagccgacccttcagcaacaacgattacaacttactccgattctgatggaacgcggtagcgcttaattactcgctttcacttggaacgcggttcggcttagatttacgctgtcttttgatcaaattattaccatcggttgttttcagaagcatgaacattgctgcactagcaacagtaataatgcccattgtgataaacgtatagtggaattgttcgacagtcgttgtgccttccattccttcataaacgcgaaggacggccgcacttacagcaacgcctaaactaatgctcagttgctgcgtgaccgccagaacactgttaccgctgctggcattgtcatcggtcagatcggcaagtgtgatggtattcatcgcggtaaactgcgtgctcatagccatccctaatataaacaacggcaagatcagcatccatatagccattgctggactttgcaaagagaactgagcgatcattagcccaataatcaccgtgatccccactaacgtatggcgatagcccagacgacgtaagacttgggtaaccatgctttttgcaataatggaacctaacgctgtcggtgccatcatacagccagcaataaacgcctgataaccaaatcctacctgtaacatcaatggcataaggaacggtacacagccggtccccagacgggttgcaatattgcctacgataccgatgctgaaagtgcgggttttaaataaatctaaactaattaatgggtttggcgtgcgtcgtgcatggagaatatagagaagcagtaacccgatgctggtgacaattaccgtcaaggcaatccagctggcgacaatcttttccccgaatagctctattccgctactgaagagaacaaggctgaggccaaacagcaaaaagccagtgatatcgaatctgcgtcgtgcggtggtgaaattgggcatatgtttgcgcgcgtaaagaaggcccgcaatacctatggggatattgattaaaaatatccagtgccaggttgcccaggtgaccagcacgccgccaagaacggggcctaaaattggccccaccagacccggcatggcgacaaaattcaatactggaagaagttcattacgaggataagcgcgcagtaaggccagccgagcaacaggcatcatcattgcgccgcctatcccctgaataacccggaagacaaccagctgtggtaggctattagaaagtgcgcaggccagagaacccaatgtgaacagactcacggcaagggtaaaaatgcgacgcgtaccgaagcgatcggctagccatccgcttaccggaataagcatcgccaccgtcagcgtataactgatgatggcactttgcatcgcgagaggagaacgattaaggctatgagcgattgcgggtaaggcggtattaagaatagtggcatcaagtgcctgcatgaagaaggccatcgccgcgatccacggcaaacccgccatactgcgcttctttttatcgctcattcaatgtcctgttatcgggttatcacttatcaggactgcgtagcagcgcctgacaagctttaaatgccgcgtcgccatcgctttggataatcgcatcgacaatcgcctgatgcagatccagctttatcactgtgtcgctggtaatactcgtgaagtaagtgtgataaacgctatggaataggctggcgaaactggtcaaaaacggattggcgctcatttcatagatatgctcatgccaggccatatcgacttcgatccagcgttcacggcgaaagttctcttttaatgccgccatttcggccattaacgtattgagatgcgctttctgttccgcggtgccaaccgttgctgccagtaggcaggcttgcggctccagacagatacgcataaccagaaagtgatcgatgacctgatgaaagttctcttctgtcatccaccaggtaagcaattcctgatcaagaaaattccagttgctttgtggcatgacccgagtaccaattcgcggtcgcggtaaaaccatcccttttgccgttaacgttttgaccgcttcgcgtaccgctgtacgactcactccaaattgctcgcccagctcaatctcaccgggcaaaatggtgccgggttcatattcaccttttaagatccgttgcgccagcttctcagccagaacatagctaaggtttttctgtgcagctaactgttgtgcgcttaaaggcattacttatcttcctttttctttttattcctccttagtatgccaccaggaagtgtgattacggttgcaaaaacggcaaattgcttgttttatggcacattaacggggcttttgctgaaaaaatgcgcggtcagaaaattattttaaatttcctcttgtcaggccggaataactccctataatgcgccaccactgacacggaacaacggcaaacacgccgccgggtcagcggggttctcctgagaactccggcagagaaagcaaaaataaatgcttgactctgtagcgggaaggcgtattatgcacaccccgcgccgctgagaaaaagcgaagcggcactgctctttaacaatttatcagacaatctgtgtgggcactcgaagatacggattcttaacgtcgcaagacgaaaaatgaataccaagtctcaagagtgaacacgtaattcattacgaagtttaattctttgagcatcaaacttttaaattgaagagtttgatcatggctcagattgaacgctggcggcaggcctaacacatgcaagtcgaacggtaacaggaaacagcttgctgtttcgctgacgagtggcggacgggtgagtaatgtctgggaaactgcctgatggagggggataactactggaaacggtagctaataccgcataacgtcgcaagaccaaagagggggaccttcgggcctcttgccatcagatgtgcccagatgggattagctagtaggtggggtaacggctcacctaggcgacgatccctagctggtctgagaggatgaccagccacactggaactgagacacggtccagactcctacgggaggcagcagtggggaatattgcacaatgggcgcaagcctgatgcagccatgccgcgtgtatgaagaaggccttcgggttgtaaagtactttcagcggggaggaagggagtaaagttaatacctttgctcattaacgttacccgcagaagaagcatcggctaactccgtgccagcagccgcggtaatacggagggtgcaagcgttaatcggaattactgggcgtaaagcgcacgcaggcggtttgttaagtcagatgtgaaatccccgggctcaacctgggaactgcatctgatactggcaagcttgagtctcgtagaggggggtagaattccaggtgtagcggtgaaatgcgtagagatctggaggaataccggtggcgaaggcggccccctggacgaagactgacgctcaggtgcgaaagcgtggggagcaaacaggattagataccctggtagtccacgccgtaaacgatgtcgacttggaggttgtgcccttgaggcgtggcttccggagctaacgcgttaagtcgaccgcctggggagtacggccgcaaggttaaaactcaaatgaattgacgggggcccgcacaagcggtggagcatgtggtttaattcgatgcaacgcgaagaaccttacctggtcttgacatccacggaagttttcagagatgagaatgtgccttcgggaaccgtgagacaggtgctgcatggctgtcgtcagctcgtgttgtgaaatgttgggttaagtcccgcaacgagcgcaacccttatcctttgttgccagcggtccggccgggaactcaaaggagactgccagtgataaactggaggaaggtggggatgacgtcaagtcatcatggcccttacgaccagggctacacacgtgctacaatggcgcatacaaagagaagcgacctcgcgagagcaagcggacctcataaagtgcgtcgtagtccggattggagtctgcaactcgactccatgaagtcggaatcgctagtaatcgtggatcagaatgccacggtgaatacgttcccgggccttgtacacaccgcccgtcacaccatgggagtgggttgcaaaagaagtaggtagcttaaccttcgggagggcgcttaccactttgtgattcatgactggggtgaagtcgtaacaaggtaaccgtaggggaacctgcggttggatcacctccttaccttaaagaagcgttctttgcagtgctcacacagattgtctgataggaagtgaaaagcaaggcgtcttgcgaagcagactgatacgtccccttcgtctagaggcccaggacaccgccctttcacggcggtaacaggggttcgaatcccctaggggacgccacttgctggtttgtgagtgaaagtcacctgccttaatatctcaaaactcatcttcgggtgatgtttgagatatttgctctttaaaaatctggatcaagctgaaaattgaaacactgaacaacgaaagttgttcgtgagtctctcaaattttcgcaacacgatgatgaatcgaaagaaacatcttcgggttgtgaggttaagcgactaagcgtacacggtggatgccctggcagtcagaggcgatgaaggacgtgctaatctgcgataagcgtcggtaaggtgatatgaaccgttataaccggcgatttccgaatggggaaacccagtgtgtttcgacacactatcattaactgaatccataggttaatgaggcgaaccgggggaactgaaacatctaagtaccccgaggaaaagaaatcaaccgagattcccccagtagcggcgagcgaacggggagcagcccagagcctgaatcagtatgtgtgttagtggaagcgtctggaaaggcgcgcgatacagggtgacagccccgtacacaaaaatgcacatattgtgagctcgatgagtagggcgggacacgtggtatcctgtctgaatatggggggaccatcctccaaggctaaatactcctgactgaccgatagtgaaccagtaccgtgagggaaaggcgaaaagaaccccggcgaggggagtgaaaaagaacctgaaaccgtgtacgtacaagcagtgggagcacgcttaggcgtgtgactgcgtaccttttgtataatgggtcagcgacttatattctgtagcaaggttaaccgaataggggagccgaagggaaaccgagtcttaactgggcgttaagttgcagggtatagacccgaaacccggtgatctagccatgggcaggttgaaggttgggtaacactaactggaggaccgaaccgactaatgttgaaaaattagcggatgacttgtggctgggggtgaaaggccaatcaaaccgggagatagctggttctccccgaaagctatttaggtagcgcctcgtgaattcatctccgggggtagagcactgtttcggcaagggggtcatcccgacttaccaacccgatgcaaactgcgaataccggagaatgttatcacgggagacacacggcgggtgctaacgtccgtcgtgaagagggaaacaacccagaccgccagctaaggtcccaaagtcatggttaagtgggaaacgatgtgggaaggcccagacagccaggatgttggcttagaagcagccatcatttaaagaaagcgtaatagctcactggtcgagtcggcctgcgcggaagatgtaacggggctaaaccatgcaccgaagctgcggcagcgacgcttatgcgttgttgggtaggggagcgttctgtaagcctgcgaaggtgtgctgtgaggcatgctggaggtatcagaagtgcgaatgctgacataagtaacgataaagcgggtgaaaagcccgctcgccggaagaccaagggttcctgtccaacgttaatcggggcagggtgagtcgacccctaaggcgaggccgaaaggcgtagtcgatgggaaacaggttaatattcctgtacttggtgttactgcgaaggggggacggagaaggctatgttggccgggcgacggttgtcccggtttaagcgtgtaggctggttttccaggcaaatccggaaaatcaaggctgaggcgtgatgacgaggcactacggtgctgaagcaacaaatgccctgcttccaggaaaagcctctaagcatcaggtaacatcaaatcgtaccccaaaccgacacaggtggtcaggtagagaataccaaggcgcttgagagaactcgggtgaaggaactaggcaaaatggtgccgtaacttcgggagaaggcacgctgatatgtaggtgaagcgacttgctcgtggagctgaaatcagtcgaagataccagctggctgcaactgtttattaaaaacacagcactgtgcaaacacgaaagtggacgtatacggtgtgacgcctgcccggtgccggaaggttaattgatggggtcagcgcaagcgaagctcttgatcgaagccccggtaaacggcggccgtaactataacggtcctaaggtagcgaaattccttgtcgggtaagttccgacctgcacgaatggcgtaatgatggccaggctgtctccacccgagactcagtgaaattgaactcgctgtgaagatgcagtgtacccgcggcaagacggaaagaccccgtgaacctttactatagcttgacactgaacattgagccttgatgtgtaggataggtgggaggctttgaagtgtggacgccagtctgcatggagccgaccttgaaataccaccctttaatgtttgatgttctaacgtggacccgtgatccgggttgcggacagtgtctggtgggtagtttgactggggcggtctcctcctaaagagtaacggaggagcacgaaggttggctaatcctggtcggacatcaggaggttagtgcaatggcataagccagcttgactgcgagcgtgacggcgcgagcaggtgcgaaagcaggtcatagtgatccggtggttctgaatggaagggccatcgctcaacggataaaaggtactccggggataacaggctgataccgcccaagagttcatatcgacggcggtgtttggcacctcgatgtcggctcatcacatcctggagctgaagtaggtcccaagggtatggctgttcgccatttaaagtggtacgcgagctgggtttagaacgtcgtgagacagttcggtccctatctgccgtgggcgctggagaactgaggggggctgctcctagtacgagaggaccggagtggacgcatcactggtgttcgggttgtcatgccaatggcactgcccggtagctaaatgcggaagagataagtgctgaaagcatctaagcacgaaacttgccccgagatgagttctccctgactccttgagagtcctgaaggaacgttgaagacgacgacgttgataggccgggtgtgtaagcgcagcgatgcgttgagctaaccggtactaatgaaccgtgaggcttaaccttacaacgccgaagatgttttggcggatgagagaagattttcagcctgatacagattaaatcagaacgcagaagcggtctgatgaaacagaatttgcctggcggccgtagcgcggtggtcccacctgaccccatgccgaactcagaagtgaaacgccgtagcgccgatggtagtgtggggtctccccatgcgagagtagggaactgccaggcatcaaattaagcagtaagccggtcataaaaccggtggttgtaaaagaattcggtggagcggtagttcagtcggttagaatacctgcctgtcacgcagggggtcgcgggttcgagtcccgtccgttccgccaccctaattaggggcgtagttcaattggtagagcaccggtctccaaaaccgggtgttgggagttcgagtctctccgcccctgccagaaatcatccttagcgaaagctaaggattttttttatctgaaataaccctctccgaagtaaatccttctaccggcatccttgccagccattcatattaatacacttcatccagcacgttaattttcaaaagatcgcgaatcaacgcatttttatcgctattttgcagccatatggcataaagcggccgactaagtgttgtgctatcgacaacggtatgcaggccgccttttttacgcgcccagctgacgggtagccaggtgcaaccattaagcatcgcaatctgttgctgtgccagttcagcagaactggttgtcagaatgggcacttcgtcagcaccgatcaaacctgcctcatgctgttgaaaatctggcccccactcaagtcgcagataattaagatctccctttagtttactaggggcactggtataaagcgctaaagtgaaatatcccagcaactgactactaaattcgtccattttgggcgcttcagtggtaataagaagatcaagctggcgttcatgcagctgttttaccagagactgccgttgggcaattcgcgcttcgaactgtaagcctgtatgggcatcctgattttgatacaagcgtcccagccactgattaagcatacattcccacaagctggcgctggcaccgatagaaaactcgttatgtcgactggtatgcgccacctccttacgggcggcctgccaggtgctcatgagcgtttctgcataaggcagtagtttttcaccggcagcggttaaacggatattgtttctgtggcgggtgaaaaggttcacacccagttgattttccagttgtctgattcgaaagctcactgcactctgggtcagatagaggctttcagccgctcgaccaaagtgacgcgttcggctaacttccaggaaagtttttaacaattccgtatccacagtgctctccgcaaaattatttgtcgttatgatttaaatgttttgttttacactctgtcaagcgtaactaatactccgcgccataactagctcggtcaaagaattaggagcgtgcaggatggcggaaagctttacgacgactaatcgatatttcgacaataaacattatccacgtggattctctcgtcatggtgatttcaccatcaaagaggcacaactgcttgagcgtcatggttatgccttcaatgagttggatcttggcaaacgcgagccggttaccgaggaagagaaactcttcgtagcagtatgccgtggcgaacgtgagccagtgacagaagcagaacgcgtgtggtccaagtatatgacgcgtattaagcgtccaaaacgttttcacaccctttccggcggtaaaccgcaggttgaaggtgctgaagactacaccgattctgacgattaataaaaagggcgaaatgccctttttttatgtcagtagtttctgcagatggatgagcaaacggtcaatcgctcgatagctaactgcctcctgcaaatgctgacgtgtgataatgtcagactgatcaatatcagcaatggttcgtgcaactttcaataaccgctgccaggcacgaatgcttaaccccagatggatcagtgttccttccaaccacatcgcatcttcgctctcaagtttgcagaattggcgtatttccggactatccagccaggcattcagtttattctgccgcttaaattggcgctctctggcggccattacgcgttgtttaacggtggcgctgctttctcccggcactaccgttttactcaaaatgccggggggtggtaatgggatctccagactgagatcgaagcggtcgagaaagggcccgctgagccggttgagataacgtaatgtctgttctggcgtgcagcggttatggtttccctgataatgtccggtagggctgggattcatcgccgcaacaagctggaaacgggctggataggttatttttgctcgtgtgcgactaagatggatctgcccggattcaatcggctctcgcaaggcatccagtgtacgccgttcaaattcaggtagctcatcaagaaaaagcacgccgttatgcgccaggctaatttcaccgggccctggaattgcgccaccgcctaccatcgcagttaagcttgcactgtgatgaggactgcggaacgggcgctgccgccattgtttttgtacactttcagcatttaccagacttaatatcgcagcactctccagtgcctcttcattgcttaaatctggcaacaggccattaatacggctggcgagcattgttttacctgttcccggcggcccaatcagtaaaaggttgtgcccgccagcagcggtaatttccagtcctcgctttccttgttcctgaccgataacatcactgagatcatgttgtagcgcccgggatactgcatcagttggtttcgggcgttcgagagcgtgcttaccttccagaaacgcacagacagcttgcagatgatcggctatcaggcatccttcaccgttaattagccccacttcatcttcgttatctttcgcgacgataatttttctgccgctcttaatagcttcagttgcactggagattgcgccgggaacgccacgcagagcgcctgtaagcgccagttctccgactaattcatattcatctaacttattggctgtaagctgttcactggccgccagcaacgcaatggcgataggtaaatcatatcgtcccccttcttttggcagatcagctggagccaggttgatggtgatttttttcgccggatattcatatccgctattgataatggcgctgcgcacgcgatcgcgagcttcttttaccgttgtttctggtaagcccaccatcgttaagccgggtagacctttactgatatgtacctcaacagtgatcgggggcgcatttactcccagggctgcgcgggtatgaacaatactcagactcataagccctccttgagtcaccattatgtgcataagatatcgctgctgtagcccgctaattcgtgaattttagtggctgattcctgtttatttgtgcaagtgaagttgagttgttctggcggtggaatgatgctcgcaaaaatgcagcggacaaaggatgaactacgaggaagggaacaacattcatactgaaattgaatttttttcactcactattttatttttaaaaaacaacaatttatattgaaattattaaacgcatcataaaaatcggccaaaaaatatcttgtactatttacaaaacctatggtaactctttaggcattccttcgaacaagatgcaagaaaagacaaaatgacagcccttctacgagtgattagcctggtcgtgattagcgtggtggtgattattatcccaccgtgcggggctgcacttggacgaggaaaggcttaaagatcaagccttaacgaactaagacccccgcaccgaaaggtccgggggttttttttgaccttaaaaacataaccgaggagcagacaatgaataacagcacaaaattctgtttctcaagattcaggacggggaactaactatgaatggcgcacagtgggtggtacatgcgttgcgggcacagggtgtgaacaccgttttcggttatccgggtggcgcaattatgccggtttacgatgcattgtatgacggcggcgtggagcacttgctatgccgacatgagcagggtgcggcaatggcggctatcggttatgctcgtgctaccggcaaaactggcgtatgtatcgccacgtctggtccgggcgcaaccaacctgataaccgggcttgcggacgcactgttagattccatccctgttgttgccatcaccggtcaagtgtccgcaccgtttatcggcactgacgcatttcaggaagtggatgtcctgggattgtcgttagcctgtaccaagcacagctttctggtgcagtcgctggaagagttgccgcgcatcatggctgaagcattcgacgttgcctgctcaggtcgtcctggtccggttctggtcgatatcccaaaagatatccagttagccagcggtgacctggaaccgtggttcaccaccgttgaaaacgaagtgactttcccacatgccgaagttgagcaagcgcgccagatgctggcaaaagcgcaaaaaccgatgctgtacgttggcggtggcgtgggtatggcgcaggcagttccggctttgcgtgaatttctcgctgccacaaaaatgcctgccacctgtacgctgaaagggctgggcgcagtagaagcagattatccgtactatctgggcatgctggggatgcacggcaccaaagcggcaaacttcgcggtgcaggagtgtgacctgctgatcgccgtgggcgcacgttttgatgaccgggtgaccggcaaactgaacaccttcgcgccacacgccagtgttatccatatggatatcgacccggcagaaatgaacaagctgcgtcaggcacatgtggcattacaaggtgatttaaatgctctgttaccagcattacagcagccgttaaatcaatgactggcagcaacactgcgcgcagctgcgtgatgaacattcctggcgttacgaccatcccggtgacgctatctacgcgccgttgttgttaaaacaactgtcggatcgtaaacctgcggattgcgtcgtgaccacagatgtggggcagcaccagatgtgggctgcgcagcacatcgcccacactcgcccggaaaatttcatcacctccagcggtttaggtaccatgggttttggtttaccggcggcggttggcgcacaagtcgcgcgaccgaacgataccgttgtctgtatctccggtgacggctctttcatgatgaatgtgcaagagctgggcaccgtaaaacgcaagcagttaccgttgaaaatcgtcttactcgataaccaacggttagggatggttcgacaatggcagcaactgttttttcaggaacgatacagcgaaaccacccttactgataaccccgatttcctcatgttagccagcgccttcggcatccatggccaacacatcacccggaaagaccaggttgaagcggcactcgacaccatgctgaacagtgatgggccatacctgcttcatgtctcaatcgacgaacttgagaacgtctggccgctggtgccgcctggcgccagtaattcagaaatgttggagaaattatcatgatgcaacatcaggtcaatgtaagcgctcgcttcaatccagaaaccttagaacgtgttttacgcgtggtgcgtcatcgtggtttccacgtctgcagtatgaatatggccgccgccagcgatgcacaaaatataaatatcgaattgaccgttgccagcccacggagcgtcgacttactgtttagtcagttaaataaactggtggacgtcgcacacgttgccatctgccagagcacaaccacaagtcaacaaatccgcgcctgagcgcaaaaggaatataaaaatgaccacgaagaaagctgattacatttggttcaatggggagatggttcgctgggaagacgcgaaggtgcatgtgatgagccacgcgctgcactatggcactagcgtttttgaaggcatccgttgctacgacagccacaaaggaccggttgtattccgccatcgtgagcatatgcagcgtctgcatgactccgccaaaatctatcgcttcccggttagccagagcattgatgagctgatggaagcttgtcgtgacgtgatccgcaaaaacaatctcaccagcgcctatatccgtccgctgatcttcgtcggtgatgttggcatgggagtaaacccgccagcgggatacagtaccgacgtgattatcgctgctttcccgtggggagcgtatctgggcgcagaagcgctggagcaggggatcgatgcgatggtttcctcctggaaccgcgcagcaccaaacaccatcccgacggcggcaaaagccggtggtaactacctctcttccctgctggtgggtagcgaagcgcgccgccacggttatcaggaaggtatcgcgctggatgtgaacggttatatctctgaaggcgcaggcgaaaacctgtttgaagtgaaagatggtgtgctgttcaccccaccgttcacctcctccgcgctgccgggtattacccgtgatgccatcatcaaactggcgaaagagctgggaattgaagtacgtgagcaggtgctgagccgcgaatccctgtacctggcggatgaagtgtttatgtccggtacggcggcagaaatcacgccagtgcgcagcgtagacggtattcaggttggcgaaggccgttgtggcccggttaccaaacgcattcagcaagccttcttcggcctcttcactggcgaaaccgaagataaatggggctggttagatcaagttaatcaataaatacaaaaaatgggacggcacgcaccgtcccatttacgagacagacactgggagtaaataaagtatgcctaagtaccgttccgccaccaccactcatggtcgtaatatggcgggtgctcgtgcgctgtggcgcgccaccggaatgaccgacgccgatttcggtaagccgattatcgcggttgtgaacagcttcacccaatttgtaccgggtcacgtccatctgcgcgatctcggtaaactggtcgccgaacaaattgaagcggctggcggcgttgccaaagagttcaacaccattgcggtggatgatgggattgccatgggccacggggggatgctttatagtctgccatctcgcgaactgatcgctgattccgttgagtatatggtcaacgcccactgcgccgacgccatggtctgcatctctaactgcgacaaaatcaccccggggatgctgatggcttccctgcgcctgaatattccggtgatctttgtttccggcggcccgatggaggccgggaaaaccaaactttccgatcagatcatcaagctcgatctggttgatgcgatgatccagggcgcagacccgaaagtatctgactcccagagcgatcaggttgaacgttccgcgtgtccgacctgcggttcctgctccgggatgtttaccgctaacagtatgaactgcctgaccgaagcgctgggcctgagccagccgggcaacggcagcctgctggcaacccacgccgaccgtaagcagctgttccttaatgctggtaaacgcattgttgaattgaccaaacgttattacgagcaaaacgacgaaagtgcactgccgcgtaatatcgccagtaaggcggcgtttgaaaacgccatgacgctggatatcgcgatgggtggaagcactaacaccgtacttcacctgctggcggcggcgcaggaagcggaaatcgacttcaccatgagtgatatcgataagctttcccgcaaggttccacagctgtgtaaagttgcgccgagcacccagaaataccatatggaagatgttcaccgtgctggtggtgttatcggtattctcggcgaactggatcgcgcggggttactgaaccgtgatgtgaaaaacgtacttggcctgacgttgccgcaaacgctggaacaatacgacgttatgctgacccaggatgacgcggtaaaaaatatgttccgcgcaggtcctgcaggcattcgtaccacacaggcattcagccaagattgccgttgggatacgctggacgacgatcgcgccaatggctgtatccgcagcctggaacacgcctacagcaaagacggcggcctggcggtgctctacggtaactttgcggaaaacggctgcatcgtgaaaacggcaggcgtcgatgacagcatcctcaaattcaccggcccggcgaaagtgtacgaaagccaggacgatgcggtagaagcgattctcggcggtaaagttgtcgccggagatgtggtagtaattcgctatgaaggcccgaaaggcggtccggggatgcaggaaatgctctacccaaccagcttcctgaaaagtatgggtctcggcaaagcctgtgcgctgatcaccgacggtcgtttctctggtggcacctctggtctttccatcggccacgtcagtccggaagcggcaagcggcggcagcattggcctgattgaagatggtgacctgatcgctatcgacatcccgaaccgtggcattcagttacaggtaagcgatgccgaactggcggcgcgtcgtgaagcgcaggacgctcgaggtgacaaagcctggacgccgaaaaatcgtgaacgtcaggtctcctttgccctgcgtgcttatgccagcctggcaaccagcgccgacaaaggcgcggtgcgcgataaaagcaaactggggggttaataatggctgacagccaacccctgtccggtgctccggaaggtgccgaatatttaagagcagtgctgcgcgcgccggtttacgaggcggcgcaggttacgccgctacaaaaaatggaaaaactgagcagccgtcttgataacgtcattctggtgaagcgcgaagatcgccagccagtgcacagctttaagctgcgcggcgcatacgccatgatggcgggcctgacggaagaacagaaagcgcacggcgtgatcactgcttctgcgggtaaccacgcgcagggcgtcgcgttttcttctgcgcggttaggcgtgaaggccctgatcgttatgccaaccgccaccgccgacatcaaagtcgacgcggtgcgcggcttcggcggcgaagtgctgctccacggcgcgaactttgatgaagcgaaagccaaagcgatcgaactgagtcagcagcaggggttcacctgggtgccgccgttcgaccatccgatggtgattgccgggcaaggcacgctggcgctggaactgctccagcaggacgcccatctcgaccgcgtatttgtgccagtcggcggcggcggtctggctgctggcgtggcggtgctgatcaaacaactgatgccgcaaatcaaagtgatcgccgtagaagcggaagactccgcctgcctgaaagcagcgctggatgcgggtcatccggttgatctgccgcgcgtagggctatttgctgaaggcgtagcggtaaaacgcatcggtgacgaaaccttccgtttatgccaggagtatctcgacgacatcatcaccgtcgatagcgatgcgatctgtgcggcgatgaaggatttattcgaagatgtgcgcgcggtggcggaaccctctggcgcgctggcgctggcgggaatgaaaaaatatatcgccctgcacaacattcgcggcgaacggctggcgcatattctttccggtgccaacgtgaacttccacggcctgcgctacgtcagtgaacgctgcgaactgggcgaacagcgtgaagcgttgttggcggtgaccattccggaagaaaaaggcagcttcctcaaattctgccaactgcttggcgggcgtagcgtcaccgagttcaactaccgttttgccgatgccaaaaacgcctgcatctttgtcggtgtgcgcctgagccgcggcctcgaagagcgcaaagaaattttgcagatgctcaacgacggcggctacagcgtggttgatctctccgacgacgaaatggcgaagctacacgtgcgctatatggtcggcggacgtccaagccatccgttgcaggaacgcctctacagcttcgaattcccggaaagtccgggcgcgctgctgcgcttcctcaacacgctgggtacgtactggaacatttctttgttccactatcgcagccatggcaccgactacgggcgcgtactggcggcgttcgaacttggcgaccatgaaccggatttcgaaacccggctgaatgagctgggctacgattgccacgacgaaaccaataacccggcgttcaggttctttttggcgggttaaggaaaaatgcctgatagcgcttcgcttatcaggcctacccgcgcgacaacgtcatttgtggttcggcaaaatcttccagaatgcctcaattagcggctcatgtagccgctttttctgcgcacacacgcccagctcaaacggcgttttctcatcgctgcgctctaaaatcatcacgcggttacgcaccggttcggggctgttttccagcaccacttccggcaacaatgccacgccacagccgagtgccaccatgcttaccatcgcttcatgcccgccaaccgtggcgtaaatcatcgggttactgattttattgcgtcgaaaccacagttcaatgcggcggcgtaccggcccctgatcggccataataaacggcaccgtactccagtccggcttctctacgctcacctgattacgcaccgggcagggcagcgcgggggcaatcagcactactgccagattctccagcatgctaaacgccactgcgccgggcaaggtttccggtttacccgcaatcgccagatccgcttcaccagtgaccaccttttccatcgcatctgccgcatcaccagtagtaagtttaatctccacgctcgggtgttccgcgcggaagcgatccagaatcggcggcagatggctgtaggcagcggtcacgctgcagaagatatgtaattcgccagagaggctcggcccttgctgatcgatggtgtggcgcaactgctgatactgcaacagcgtttgctgggcgaaaacgcgcagctcttcgcccgcttcagtcagcgtcaccgtgcggttatcgcgcacaaacagcggctgaccgagatcttcttccaggcgctgaatctgccgactgagcgtggatgggctaacgtgcatcgcccgcgcgctgcggccaaaatggcggctttccgccagatgcaggaaggttttcagatcgcgtaaatccacagggacagccctcgatgttgacgttgcaaaaattgcaatgtgacgttgtgaatatatcaatttccgcaataaatttcctgtcatatagtgaattcaatctcgcaaacgcgaaccgaacaataagaagcacaacatcacgaggaatcaccatggctaactacttcaatacactgaatctgcgccagcagctggcacagctgggcaaatgtcgctttatgggccgcgatgaattcgccgatggcgcgagctaccttcagggtaaaaaagtagtcatcgtcggctgtggcgcacagggtctgaaccagggcctgaacatgcgtgattctggtctcgatatctcctacgctctgcgtaaagaagcgattgccgagaagcgcgcgtcctggcgtaaagcgaccgaaaatggttttaaagtgggtacttacgaagaactgatcccacaggcggatctggtgattaacctgacgccggacaagcagcactctgatgtagtgcgcaccgtacagccactgatgaaagacggcgcggcgctgggctacagccacggtttcaacatcgtcgaagtgggcgagcagatccgtaaagatatcaccgtagtgatggttgcgccgaaatgcccaggcaccgaagtgcgtgaagagtacaaacgtgggttcggcgtaccgacgctgattgccgttcacccggaaaacgatccgaaaggcgaaggcatggcgattgccaaagcctgggcggctgcaaccggtggtcaccgtgcgggtgtgctggaaagctccttcgttgcggaagtgaaatctgacctgatgggcgagcaaaccatcctgtgcggtatgttgcaggctggctctctgctgtgcttcgacaagctggtggaagaaggtaccgatccagcatacgcagaaaaactgattcagttcggttgggaaaccatcaccgaagcactgaaacagggcggcatcaccctgatgatggaccgtctctctaacccggcgaaactgcgtgcttatgcgctttctgaacagctgaaagagatcatggcacccctgttccagaaacatatggacgacatcatctccggcgaattctcttccggtatgatggcggactgggccaacgatgataagaaactgctgacctggcgtgaagagaccggcaaaaccgcgtttgaaaccgcgccgcagtatgaaggcaaaatcggcgagcaggagtacttcgataaaggcgtactgatgattgcgatggtgaaagcgggcgttgaactggcgttcgaaaccatggtcgattccggcatcattgaagagtctgcatattatgaaagtctgcacgagctgccgctgattgccaacaccatcgcccgtaagcgtctgtacgaaatgaacgtggttatctctgataccgctgagtacggtaactatctgttctcttacgcttgtgtgccgttgctgaaaccgtttatggcagagctgcaaccgggcgacctgggtaaagctattccggaaggcgcggtagataacgggcaactgcgtgatgtgaacgaagcgattcgcagccatgcgattgagcaggtaggtaagaaactgcgcggctatatgacagatatgaaacgtattgctgttgcgggttaagtgcgcgctgatgccctcaccccgaccctctcccacagggagagggagaaaacactcaaggccttctcctggagaaggccttgctattagttgcggtacagcaccttaatgatgtgatatccgaactgggtgtgcagcgggccggtcggctccagtaccggacaagagaaaaccactttatcgaacgccggaaccatctgaccctggcggaattcacctaaatcaccgccgcgtttgccacttgggcaaatggagtgtttcttcgccagcttgccgaaatcggccccgttcttaatctgctcgagaagatccagagccagtttctcttcttttacaaggatatgcagtgctgctgctgtttttgccatgatcgtgccttgagtgaataattgtcaggcggcgattttagcatgatccgcagatgctaacgtaattgtcagtcagggagtggctggtacatatatggcaaaagcccggaaaatccgggcttcgcaggtccctcaaggggagaaaacttagggcctctatgggctacaaagtcattatcggggatggttattttattgtcaatttatgaggcttatggcattgatactcttgatgaccgccctctgtatgtctgcaaccaactcatgtggcaaacattgattaagataccctctgtaagtccttgctctgtttaatctgtttcgactgacttgttgtaccaggtcggctttggcccaacgaatctgctgatcaaagaattgcaggtcattgataacattactggctatttcaacatgcattccacgttttaacttgtctggtcggctgtggttgataatggaacgacgatgcatgcgttgccattaatttttccgttgagcacgacaactaacctgttttttatcatttcaggaggaatgcggccatcgtaatacgtcgtgctgaacggtccattttggctaacaggatagttaccaaagttgcattccagtatttcaccaaccttagggctgaaattaatcgccacgagtaaacctctccttagtaaactctgaaaaagtaataacacaacgttacgacccgatattttctaagtctaatggattcacgatgaactccgatttcggtcttctctctctgatttaaacatccgcagccaaccggttagcggcttacacgcggtcacattcaaatgcgattctgctacaatcctccccccgttcgaagattgagcaatacacctatgcgtctaaaccccggccaacaacaagctgtcgaattcgttaccggcccctgcctggtgctggcgggcgcgggttccggtaaaactcgtgttatcaccaataaaatcgcccatctgatccgcggttgcggttatcaggcgcggcacattgcggcggtgacctttactaataaagcagcgcgcgagatgaaagagcgtgtagggcagacgctggggcgcaaagaggcgcgtgggctgatgatctccactttccatacgttggggctggatatcatcaaacgcgagtatgcggcgcttgggatgaaagcgaacttcagcttgtttgacgataccgatcagcttgctttgcttaaagagttgaccgaggggctgattgaagatgacaaagttctcctgcaacaactgattagcaccatctctaactggaagaatgatctcaaaacaccgtcccaggcggcagcaagtgcgattggcgagcgggaccgtatttttgcccattgttatgggctgtatgatgcacacctgaaagcctgtaacgttctcgacttcgatgatctgattttattgccgacgttgctgctgcaacgcaatgaagaagtccgcaagcgctggcagaacaaaattcgctatctgctggtggatgagtatcaggacaccaacaccagccagtatgagctggtgaaactgctggtgggcagccgcgcgcgctttaccgtggtgggtgacgatgaccagagcatctactcctggcgcggtgcacgtccgcaaaacctggtgctgctgagtcaggattttccggcgctgaaggtgattaagcttgagcagaactatcgctcttccgggcgtattctgaaagcggcgaacatcctgatcgccaataacccgcacgtctttgaaaagcgtctgttctccgaactgggttatggcgcggagctaaaagtattaagcgcgaataacgaagaacatgaggctgagcgcgttactggcgagctgatcgcccatcacttcgtcaataaaacgcagtacaaagattacgccattctttatcgcggtaaccatcagagccgggtgtttgaaaaattcctgatgcaaaaccgcatcccgtacaaaatatctggtggtacgagctttttctctcgtcctgaaatcaaggacttgctggcttatctgcgcgtgctgactaacccggacgatgacagcgcatttctgcgtatcgttaacacgccgaagcgagagattggcccggctacgctgaaaaagctgggtgagtgggcgatgacgcgcaataaaagcatgtttaccgccagctttgatatgggcctgagtcagacgcttagcggacgtggttatgaagcattgacccgcttcactcactggttggcagaaatccagcgtctggcggagcgggagccgattgccgcggtgcgtgatctgatccatggcatggattatgaatcctggctgtacgaaacaagccccagcccgaaagccgccgaaatgcgcatgaagaacgtcaaccaactgtttagctggatgacggagatgctggaaggcagtgaactggatgagccgatgacgctcacccaggtggtgacgcgctttactttgcgcgacatgatggagcgtggtgagagtgaagaagagctggatcaggtgcaactgatgactctccacgcgagcaaagggctggagtttccttatgtctacatggtcggtatggaagaagggtttttgccgcaccagagcagcatcgatgaagataatatcgatgaggagcggcggctggcctatgtcggcattacccgcgcccagaaggaattgacctttacgctgtgtaaagaacgccgtcagtacggcgaactggtgcgcccggagccgagccgctttttgctggagctgccgcaggatgatctgatttgggaacaggagcgcaaagtggtcagcgccgaagaacggatgcagaaagggcaaagccatctggcgaatctgaaagcgatgatggcggcaaaacgagggaaataatcaaggccggaaaagatgcgtcagcatcgcatccggcacttactcattaatgcacttccagcggccagtggacatagctctgccactggctttcctgagcaataatctctttacccagcggatgttgggttagccaaccttgcggaagcgtcaaggtcaacagttcatggttagcctgtaatgtcatctctggcacgagatcgtcacggcgacggctggcaaaaatgatggccaggcgtagtaaacggcagagttgttctgcgacgcgcggcggtacggcattttgctgatgcaggctactgagatcgaccggattagtctggttgagcagtagcgtcgccagcaattttttctgtgcgggggtaaaaccgggaagatccagattacgcaccagataagcagcgtgttgcggcgcttgtttgaagtcaacgctcaggccgatttcatgaagctgacaggcgctgatgagcaaatcgcggcttattgcttcaagatgccattcgttttccacctgatcgaagaagttagccgcaactttggctacgcgctgtgcctgatcaatatcgatcataaagcggcgttgaatattacgcagcgtacggctgcgaatatcctgctcgacggccagatgcaacatgccgtagaccaggccttcacgcagcgcaccgcccgccagggtcatacactgaatattcagttcggtaaaaatggcgatcaggatcgccagaccactcgggaacactaacgcacgttccagcgtcagcccgtcaatctccagttcctccagccgaccgcaatgaatggctcgctgtttcaattgctgcaacttttccagggtaatgcgttcatccatcccctgtgccatcatgatttcctgtaacgcctgcacggtgccggaagcaccaacgcacactttccagccgtgataccgtaattcatcggcaaccggacgtaacacttcgcgtgccgctttttctgcagcatcaaaattttcctgccccagattacgatcggcaaaatagcgttccagccaggtgacgcagcccatgctcaggctgaacaagctggtggtttgtgcacccgtgccggttaccagttcagtactggctccgcctatatccaccaccaggcgctgatcggcaccaccagtggtgtgagcaacgccctgataaatcagacgtgcttcctcttcaccgctgatcacctgtaccggacaaccgagaatttcctgcgctttggcaataaaatcacccgcattgacggcaaggcgtaacgtcgccgtagcgacaacgcgaatttggctgggaggaatatcttgcagacgttcagcaaacaggcgcaaacattgccaaccgcgctccattgcttcattggagagggcattttcgctattcaggccagcagccagacgcactttgcgttttattcgcgtcagcgtctggatgcttccagccacctcgcgcacaaccagcatatgaaaactattgctaccgagatcaatggctgcatacaggctgctggtggaacccatactcttcatccttcaatctgtctctgtgttggctgcattctttcacctgaatcacttactacagtaagctcatcgggattcattctcttgccatcttgatacagtttgaatgattttgagtatgacattttttatttaaccactacgacgacgattacgcggagcgccagtacgacgcggaccattgcctgtgcgcgggcgcgtgaggcgcagcggttttggcagatcggtcatcaatgcgtccggattgtatttgcttaccggaatactgtgaccaatataggtctcaatagcaggcaaattcaatgcatactcttcacacgccaggctgatagagtgaccgcttgcgcctgcgcgacctgtacgaccaatacggtgaacgtaatcttcacagtcatcgggtaaatcgtagttaaagacgtgcgtcactgccggaatatgcaaaccacgcgcggcaacgtcggtggcaaccagaatatccagatcgccacgggtaaattcatcaagaatacgcagacgttttttctgcgcgacatcgcctgtcaataaaccgacacgatgaccatctgctgccaggtggccccagatctcttcacaacggtgtttggtgttggcgaaaataatcgctctgtctggccactcttcttcgatcagcgtttgcagcaaacgcattttttcttcgttagaagggtagaaaagctcttctttaatacggtggcccgttttctgttccggttccacttcaatatattcggcattgttcatctgctcgaacgccagttcacgtacccggtagctaagcgtggcggagaacagcatgttgaggcgctggtttgcaggcggcatacggcggaacagccagcggatatctttaataaagcccagatcgtacatgcgatcggcttcgtccagtaccaccacctgaatggcaccgaggttaatgtggttctgcttggcgtagtcaattaaacgccccgtggtgccaatcagaatgtcaacgccgctttccagcactttcagctgtttgtcgtagccatcaccaccgtaagccagacccagcttcaggccagtagcttccgccagcggttctgcgtcggcatggatctgcacggcaagttcacgcgtcggtgccataattaaggcacgcggctgattcaccttgcgatcggcaatcgcaggatgagagagaagataatgaaacgtactcgtaagaaacgccatcgttttcccggtaccggtttgcgcctgcccggctacgtcacgacccgccagcgtcagcggaagggccagtgcctgaatgggcgtacagttatgaaacccttttttttcaagggcttctacaaccttcggatgcagggcgaagtcggaaaacttctgttctgttaaatgtgttttgctcatagtgtggtagaatatcagcttactattgctttacgaaagcgtatccggtgaaataaagtcaacctttagttggttaatgttacaccaacaacgaaaccaacacgccaggcttattcctgtggagttatatatgagcgataaaattattcacctgactgacgacagttttgacacggatgtactcaaagcggacggggcgatcctcgtcgatttctgggcagagtggtgcggtccgtgcaaaatgatcgccccgattctggatgaaatcgctgacgaatatcagggcaaactgaccgttgcaaaactgaacatcgatcaaaaccctggcactgcgccgaaatatggcatccgtggtatcccgactctgctgctgttcaaaaacggtgaagtggcggcaaccaaagtgggtgcactgtctaaaggtcagttgaaagagttcctcgacgctaacctggcgtaagggaatttcatgttcgggtgccccgtcgctaaaaactggacgcccggcgtgagtcatgctaacttagtgttgacttcgtattaaacataccttattaagtttgaatcttgtaatttccaacgcttcccgttttatcttaaatgcgaagtgaacagatttctggcagcagtctcaatccgtcttgtcgtttcagttctgcgtactctcctgtgaccaggcagcgaaaagacatgagtcgatgaccgtaaacaggcatggatgatcctgccataccattcacaacattaagttcgagatttaccccaagtttaagaactcacaccactatgaatcttaccgaattaaagaatacgccggtttctgagctgatcactctcggcgaaaatatggggctggaaaacctggctcgtatgcgtaagcaggacattatttttgccatcctgaagcagcacgcaaagagtggcgaagatatctttggtgatggcgtactggagatattgcaggatggatttggtttcctccgttccgcagacagctcctacctcgccggtcctgatgacatctacgtttcccctagccaaatccgccgtttcaacctccgcactggtgataccatctctggtaagattcgcccgccgaaagaaggtgaacgctattttgcgctgctgaaagttaacgaagttaacttcgacaaacctgaaaacgcccgcaacaaaatcctctttgagaacttaaccccgctgcacgcaaactctcgtctgcgtatggaacgtggtaacggttctactgaagatttaactgctcgcgtactggatctggcaagtcctatcggtcgtggtcagcgtggtctgattgtggcaccgccgaaagccggtaaaaccatgctgctgcagaacattgctcagagcattgcttacaaccacccggattgtgtgctgatggttctgctgatcgacgaacgtccggaagaagtaaccgagatgcagcgtctggtaaaaggtgaagttgttgcttctacctttgacgaacccgcatctcgccacgttcaggttgcggaaatggtgatcgagaaggccaaacgcctggttgagcacaagaaagacgttatcattctgctcgactccatcactcgtctggcgcgcgcttacaacaccgttgttccggcgagtggtaaagtgttgaccggtggtgtggatgccaacgccctgcatcgtccgaaacgcttctttggtgcggcgcgtaacgtggaagagggcggcagcctgaccattatcgcgacggcgcttatcgataccggttctaaaatggacgaagttatctacgaagagtttaaaggtacaggcaacatggaactgcacctctctcgtaagatcgctgaaaaacgcgtcttcccggctatcgactacaaccgttctggtacccgtaaagaagagctgctcacgactcaggaagaactgcagaaaatgtggatcctgcgcaaaatcattcacccgatgggcgaaatcgatgcaatggaattcctcattaataaactggcaatgaccaagaccaatgacgatttcttcgaaatgatgaaacgcagttaaatttgtcttatgccaaaaacgccacgtgtttacgtggcgttttgcttttatatctgtaatcttaatgccgcgctggcgatgttaggaaaattcctggaatttgctggcatgttatgcaatttgcatatcaaatggttaatttttgcacaggactggtgggtttggaacggactttcccttctgaataaaggtcttcgtggttatacttctgctaataattttctctgagagcatgcattgtgaatttactgacagtgagtactgatctcatcagtatttttttattcacgacactgtttctgttttttgcccgtaaggtggcaaaaaaagtcggtttagtggataaaccaaacttccgcaaacgtcaccagggattgatacctctcgttggggggattagcgtttacgcagggatttgcttcacgttcggaattgtcgattactatattccgcatgcatctctctatctcgcttgtgccggtgtgcttgttttcattggcgcgctggatgaccgttttgatatcagcgtaaaaatccgtgccaccatacaggccgctgttggcattgttatgatggtgttcggcaagctttatctcagtagcctgggttatatctttggctcctgggagatggtgctcggaccgtttggttacttcctgacgctatttgccgtctgggcggccattaatgcgttcaacatggttgatggcattgatggcttgctgggcgggttgtcctgcgtcagctttgcagcaatcggtatgattttgtggttcgacgggcaaaccagcctcgcaatctggtgctttgcgatgatcgccgccatcctgccatacatcatgcttaaccttggtatcctgggtcgccgctacaaagtctttatgggtgatgcgggcagtacgctgattggttttaccgttatctggatcctgctcgaaacgacccagggcaaaacccatcccatcagcccggttaccgctttgtggataatcgccattccgctaatggatatggtggcgattatgtaccgtcgcctgcgtaaaggcatgagcccattctctcctgaccgtcagcatattcaccatttgatcatgcgtgccgggtttacttcccgtcaggcgtttgtgctgattacccttgccgcagcactgctcgcttccattggcgtgctggcagaatattctcattttgtcccggagtgggtcatgctggtgctctttttgctagcattcttcctctatggatattgcattaagcgtgcctggaaagttgctcgctttattaagcgcgtaaaacgcagactgcgtagaaatcgtggtggcagccccaatttaaccaaataaatgaggatgtgatgacacaaccaatgcctgggaaaccggccgaagacgctgaaaatgaactggatattcgtgggttgtttcgtaccttgtgggctgggaagctatggattattggcatggggctggcgtttgcgttaatcgcgctggcgtatacgttttttgctcgtcaggagtggagcagcacggcgattaccgatcgtccaacggtgaatatgctggggggatattacagccagcagcaatttttgcgtaacctggatgtccgtagtaacatggcttctgccgaccaaccaagcgtcatggacgaagcctataaagagtttgttatgcaactggccagctgggatacccgcagagagttctggctgcaaaccgactattacaaacagcggatggtgggcaacagcaaagccgatgcggcgttgctggatgaaatgattaacaacatccagtttatccccggagactttacccgcgcggtcaatgacagcgtgaagcttattgccgaaaccgcgcctgacgctaataacctgttacgtcagtatgttgcttttgccagccagcgtgcagccagccatctgaatgatgagctgaaaggcgcatgggcggcgcgtaccatccagatgaaagctcaggtgaagcgtcaggaagaggtggcgaaagccatctacgaccgccggatgaacagcattgagcaggcgctgaaaattgctgagcagcataatattagccgcagtgcgacagatgtacctgccgaggaattacctgatagtgaaatgttcctgcttgggcgtccaatgcttcaggctcgactggaaaatttacaggccgtcggtccggcctttgatctcgactatgatcagaatcgggccatgttaaacaccctgaatgttggtccaaccctggatccgcgttttcagacctatcgctatttgcgtacgccggaagaaccggtaaaacgcgatagcccacgtcgtgccttcctgatgattatgtggggcattgtcggggggctgatcggggctggtgtcgcattaacccgccgttgcagcaaataacaacactgctgcggtgagcgcaaaggcgctcgccgcttattcgaagagaatcgatgtgaaagtactgactgtatttggtacgcgcccggaagccatcaagatggcgccgttggtgcatgcgttggcaaaagatcctttttttgaggctaaagtttgcgtcactgcgcagcatcgggagatgctcgatcaggtgctgaaactcttttccattgtacctgactacgatctcaacataatgcagccaggacagggcctgacagagataacctgtcggattctggaagggctaaaacctattcttgccgagttcaaaccagacgtcgtgctggttcacggcgatacgacgacgacgctggcaaccagcctggcggcgttttatcagcgtattcctgttggtcacgttgaggctggtctgcgcacgggcgatctctatagcccgtggccggaagaggctaaccgtacattgaccgggcatctggcgatgtatcacttctctccaaccgaaacttcccggcaaaacttgctgcgtgaaaacgttgcggatagccgaatcttcattaccggtaatacagtcattgatgcactgttatgggtgcgtgaccaggtgatgagcagcgacaagctgcgtagtgaactggcggcaaattacccgtttatcgaccccgataaaaagatgattctggtgaccggtcacaggcgtgagagtttcggtcgtggctttgaagaaatctgccacgcgctggcagacatcgccaccacgcaccaggacatccagattgtctatccggtgcatctcaacccgaacgtcagagaaccggtcaatcgcattctggggcatgtgaaaaatgtcattctgatcgatccccaggagtatttaccgtttgtctggctgatgaaccacgcctggctgattttgaccgacagtggcggcattcaggaagaagcgcctagcctggggaaacctgtgctggtgatgcgcgataccactgagcgtccggaagcggtgacggcgggtacggtgcgtctggtaggcacggataagcagcgaattgtcgaggaagtgacgcgtcttttaaaagacgaaaacgaatatcaagctatgagccgcgcccataacccgtatggtgatggtcaggcatgctctcgcattctggaagcgttaaaaaataatcggataagtctatgagttttgcgaccatttctgttatcggactgggttatatcgggctgccaacggcagcagcgtttgccagtcggcaaaaacaggtaattggtgtcgatatcaaccaacatgcggttgataccatcaatcgtggcgaaatccatatcgtcgaacctgatttggcgagtgtagtaaaaactgccgtagaaggcggttttttacgagcgagcacgacgccagttgaagcggatgcctggctgattgctgtacccacgccgtttaagggcgatcatgagccagatatgacctacgttgaaagcgctgctcgctccattgcgccagtgctgaaaaaaggcgcgctggtgatccttgaatccaccagcccggtggggagtaccgagaagatggcagaatggttagcagagatgcgtccggatctcactttcccgcagcaggtgggcgagcaggcggacgtcaacattgcttactgcccggaacgcgtgttaccaggacaggtaatggtcgagctgattaaaaacgatcgcgtgattggtggtatgacgccggtttgtagcgcccgcgccagcgaactgtacaaaattttcctcgaaggtgagtgtgtcgtcactaacagccggacggcggaaatgtgtaagctcaccgaaaacagcttccgcgatgtgaatatcgcttttgctaatgaattgagcctgatttgtgccgatcaggggattaacgtctgggaactgattcgcctggcgaatcgtcaccctcgcgttaatattcttcagcctggccctggcgtgggcggtcactgcattgctgttgatccgtggtttatcgtggcacagaacccccagcaggcgcggcttatccgtaccgcgcgcgaagtgaacgatcacaaaccgttctgggttatcgatcaggtgaaagcggcggtggctgattgcctggcggctaccgataaacgcgccagtgaactgaaaatcgcctgctttggtctggcgtttaaaccgaatattgatgacctgcgcgaaagcccggcgatggaaatcgctgaactgatcgcccagtggcatagcggcgaaactctggttgttgagcctaacatccaccagttgccgaaaaaactgaccgggctttgtactctggcgcagcttgacgaggcgctggcaacggcagacgtgctggtgatgctggtcgatcatagtcagttcaaagttatcaatggcgacaatgtccatcagcagtatgtcgtcgatgccaaaggagtctggcgctgatgagaaaaattctgataacaggtggtgccgggtttattggcagcgcgctggtgcgttatatcatcaacgaaacgagcgacgcggtggtagtggtcgataagctgacctacgccggaaacctgatgagcctggcaccggtcgcgcaaagcgagcgctttgcctttgagaaagttgatatctgcgatcgggcagaactggcacgcgtattcactgagcatcagccagactgtgtcatgcatctggcagccgaaagccatgttgaccgttctattgacggcccggcagcgtttattgaaaccaacattgtcgggacttatacattgcttgaagcggcgcgggcttactggaatgcgctgacggaagataaaaaaagtgcgttccgttttcatcatatctccactgacgaagtatatggtgacctgcacagcacggatgatttcttcaccgaaaccacgccgtatgcgccgagcagcccttattccgcgagtaaagccagcagcgaccatctggtgcgcgcctggctgcggacctatggtctgccgacgcttatcaccaactgcagcaataactacggcccttaccactttccggaaaaactgatcccgctgatgatcctcaacgcgctggcgggtaaaagcctgccggtatatggcaacgggcagcaaatccgtgactggctgtatgtggaagatcacgcccgcgcgctgtattgcgtggcgaccaccgggaaagtcggtgaaacctataatattggtggtcacaacgagcgtaagaatctcgatgttgtggaaaccatttgcgagctgctggaagaactggctccgaacaagccgcacggcgtggcgcactatcgtgacctgatcacctttgtcgctgaccgtccggggcatgatctgcgttatgccattgatgctagcaaaattgcccgtgaacttggctggctgccgcaggaaacctttgaaagtggaatgcgtaaaacggttcagtggtatctggctaatgaaagctggtggaagcaggtgcaggacggcagctatcagggcgagcgtttaggtctgaaaggctaattttcagcggaggcaaacatgaaaggtattatcctggcgggcggttccggcacccgattgcatccgattacgcgcggcgtaagcaagcaactgttgccgatttacgataagccaatgatttactatccgctgagcgtgctgatgctggccggtatccgcgaaattctcatcatcactacgccggaagataaaggttatttccagcgcctgctgggcgatggtagtgagttcggtatccagctggaatatgccgaacagcccagcccggacggtctggcgcaggcctttatcatcggtgaaaccttccttaatggtgaaccttcttgtctggtgctgggcgataacatcttcttcggtcagggcttcagtccgaagctgcgtcatgttgcggcgcgcaccgaaggggcgacggtttttggctatcaggtgatggacccggaacgctttggcgtggtggagtttgacgacaatttccgcgctatcagcctggaagaaaagccaaaacagccgaagagtaactgggcggtgaccgggctttatttctacgacagtaaagtcgtggagtacgcaaagcaggtgaagccgagcgagcgtggtgaactggagattacctccatcaaccagatgtacctcgaggcgggcaacctgaccgttgaactgctcgggcgcggatttgcctggctggataccggcactcacgacagcctgattgaagccagcacctttgtacagacggtggaaaaacgccagggctttaagattgcctgcctggaagagattgcctggcgtaacggctggctcgatgacgagggtgtgaagcgtgctgccagtagtttagcgaaaactggctacggccaatatctgctggagttacttcgtgcccgtccgcgccagtattgagccactaacctgggaaaacgccttctttggtgttaacagcgccatcgtgcgcattacgtctgaagcaccgctcctgacgccagacgcgttagcgccgtggtcacgggtgcaggccaaaattgcggcaagtaatacgggtgaactggatgccctgcaacagctgggattctccctggtagaaggtgaagttgatttggcgctacccgtgaacaatgccagtgatagcggtgctgtagtggcacaagagaccgatattcccgcattacgtcagttagccagcgccgcatttgcgcaaagccgttttcgtgcgccgtggtatgcgcctgacgccagcagtcgcttttatgcacagtggattgaaaatgccgtgcgcggcacctttgatcatcaatgtctgattttacgtgcggcgtccggcgatattcgcggctatgtctctttacgggaactcaatgcgacagatgcgcgaattggcctgctggctggacgcggtgcaggtgctgagctgatgcaaacggcgctaaactgggcgtatgctcgcggtaaaacaactttgcgggtggcgacccaaatgggcaacaccgccgcgcttaaacgatacatacaaagtggtgcgaatgtagaaagcaccgcgtactggttatacaggtgatcacatgattccatttaacgcaccgccggtggtgggaaccgaactcgactatatgcagagcgcaatgggtagcggcaaactgtgtggcgatggcggttttacccgtcgctgccagcagtggctggagcaacgttttggcagcgccaaagtgttactgacgccgtcctgcaccgctagcctggagatggcggcgctgctgctcgatatccagcctggcgatgaagtgatcatgccgagctacacctttgtctccaccgccaatgcctttgtgctgcgtggcgcaaaaatcgtttttgtggatgttcgcccggacaccatgaacatcgacgaaacgctgattgaagcggcgatcaccgacaaaacgcgcgttatcgtgccggtccattacgcgggtgtggcctgcgaaatggacaccattatggcgttggcgaaaaagcataatttgtttgtggtagaagatgccgctcagggcgtgatgtccacttacaaagggcgtgcactgggaaccattggtcatattggctgctttagcttccatgaaaccaaaaactacacggcgggcggtgaaggcggcgcgacgctgattaacgataaagcgttaatcgaacgagccgagatcatccgtgaaaagggcactaaccgcagccagttcttccgtggtcaggtcgataaatatacctggcgcgatattggctccagctatttgatgtccgatctgcaagctgcatacctgtgggcgcaactggaagcagcggatcgtatcaaccagcaacgtctggcgctgtggcaaaactactacgatgcgttagcgcctctggcgaaagccgggcgtatcgagctgccgagcattcccgatggctgcgtgcagaacgcgcatatgttctacattaaactgcgggatattgatgaccggagcgcgttgattaactttctgaaagaagcggaaatcatggcggtgtttcattacattccgctgcacggttgccctgcgggggaacactttggtgagttccacggtgaagatcgctacaccaccaaagagagcgagcgcctgctgcgcctgccgctgttctacaacctgagccccgtcaatcagcgtacggtaattgcgactttgttgaactacttttcctgatatgagcttggcaaaagcgtccttgtggacggcggccagtacactggtcaagattggtgccgggttactggtcggtaagttgctggcggtgagttttggtccggcggggcttgggctggcggcaaatttccgccagttgattaccgtgctcggcgtgcttgccggggctggcatctttaacggtgtaaccaaatacgttgcccagtaccatgataatccgcaacagctgcgccgcgtggtcggcactagtagtgcgatggtacttggtttctctacgctgatggcgctggtttttgtgctggcagctgcgccaatcagccagggattgtttggtaataccgactatcaggggctggtgcgtttagtggcgctggtgcaaatggggatcgcctggggcaacctgttactggcgctgatgaaaggctttcgcgatgccgcaggtaatgcgttaagcctgattgtcggcagcttgattggcgttctcgcgtactacgtcagttaccgtttgggcggttatgaaggggcgttgctgggtctggcgctgattcccgcgctggtggtaattcctgccgccatcatgttgatcaaacgtggtgtcatcccgttaagctatctgaaacccagctgggataacggtctggcagggcagttgagcaaatttacgctcatggcgttgattacgagcgtgaccttgcctgttgcttacatcatgatgcgtaaactgctggcggcgcagtatagctgggatgaggtggggatctggcaaggggtgagcagtatttccgatgcctacctgcaatttattacggcaagcttcagcgtatatttgctgcccacgttgagccggctaacggaaaagcgcgatatcacccgggaagtggttaaaagcctgaaattcgtcttaccggcagtggcggcggcgagttttaccgtctggctgctgcgtgattttgctatctggctgctgttgagcaataaatttaccgctatgcgcgatctctttgcctggcagttagtgggtgatgtgttaaaagtgggcgcttatgtctttggttatctggtgatcgccaaagcgagtctgcggttttatattctggcggaagtcagccagttcactttattgatggtatttgcccactggctaatccctgcgcatggtgcactgggcgcggcgcaggcatatatggcaacttatatcgtctatttttctctttgttgtggcgtgtttttactctggcgtaggcgggcatgactgtactgattcacgtactgggaagcgatatccctcaccataaccgaaccgttttgcggtttttcaatgacgcgctggccgcgacgagcgagcacgcgcgcgagtttatggttgttggcaaggacgacggcttaagtgatagctgtccggcgctttctgtgcaatttttccctgggaaaaaaagcctggcggaagcggtcatcgcgaaagcaaaagctaaccgtcagcagcgttttttcttccacggtcagttcaatcccacactgtggctggctctgctgagtggtggcattaagcccagccagtttttctggcatatctggggggcagacctgtatgagctttccagtggcttgagatataagcttttttacccactacgtcgcctggcgcaaaagcgagtcggctgtgtatttgccacccgcggcgatttgagcttttttgccaaaacgcacccaaaggtgcggggcgaactgctgttcttcccgacgcggatggaccctagcctcaatacgatggcgaacgatcggcaacgtgaagggaaaatgaccattctggtggggaactccggcgaccgcagcaatgagcatattgctgccttgcgcgccgttcatcagcaatttggcgatacggtaaaagtggtggtgccgatgggatatccgcctaataacgaagcgtacattgaggaagttcgtcaggcggggctggagttattcagcgaagaaaatctacaaattctgagcgaaaaactggaatttgacgcctatctggcgctacttcgtcagtgcgatcttggttactttatttttgcccgccagcagggcattggtacgctgtgcttactgattcaggcgggcattccttgtgtgcttaaccgggaaaatccgttctggcaggatatgacggaacaacatttgccggtgctgtttactaccgacgatctcaacgaggatattgtgcgtgaagcgcagcgccagttggcgagcgtggataaaaacaccattgccttctttagccctaactatctacaaggctggcagcgggcgttggcgattgccgccagggaggtcgcatgagtctgctgcaattcagtggcctgtttgttgtctggctgctctgcacgctgtttattgccacgctgacctggtttgagtttcgccgtgtgcgctttaacttcaatgtcttctttagtttgctgtttttgctcacctttttcttcggcttcccgctgaccagcgtgctggtatttcgctttgatgttggtgtcgcgccgccagaaatcttgttgcaggcgttgctttctgcgggctgcttctacgcggtttactatgtcacctacaaaacccgcctacgcaaacgcgttgctgatgtaccgcgccgtccgctgtttaccatgaaccgcgtggagaccaatcttacgtgggtgatcctgatgggtatcgcgctggtaagcgtcggcatcttcttcatgcacaacggctttttgctgttccggcttaactcctacagtcagatcttttccagtgaagtctccggcgtggcgttaaaacgcttcttttactttttcatcccggcgatgctggtggtctactttctgcgccaggacagcaaagcgtggctgtttttcctcgtcagcacggtcgcctttggcttgctgacttatatgattgtcggcggcactcgcgccaatatcatcatcgcattcgctatcttcctgtttattggcattattcgcggctggattagcttgtggatgctggcggcggcgggcgtgctggggattgttggcatgttctggctggcactaaaacgctatggaatgaatgtgagcggcgatgaagcgttctatacgtttctctatctcactcgcgacaccttcagcccgtgggagaatctggcgttgctgttgcagaactacgacaacatcgacttccagggcctggctccaattgtccgcgatttctatgtctttatcccttcctggctgtggccgggtcgcccgagtatggtgctgaacagtgccaactactttacctgggaagtgctgaataaccactccggactggcgatcagccctacgcttataggcagtctggtggtgatgggcggcgcgttgttcatcccgctcggggcgatcgtggttggtctgatcatcaaatggttcgactggctgtatgagctgggcaaccgcgagcctaatcgctataaagctgcgatattgcacagtttctgctttggggcgatcttcaatatgatcgtgctggcgcgtgaagggctggatagctttgtcagtcgcgtggtcttttttatcgtggtcttcggcgcatgtctgatgatcgcaaaactgttgtactggctttttgaaagcgccggactcattcataaacgtacaaaaagtagcctccggacgcaggttgaaggataacaatgaataacaacaccacggcaccaacctatacgctgcgtggcttacagttgattggttggcgtgatatgcagcacgccctcgattatctgtttgctgacgggcagcttaagcagggaacgctggttgccattaatgctgaaaaaatgctgactattgaagataacgccgaggtcagggagttaattaacgctgccgaatttaaatatgcggatggcatcagcgttgtacgtagtgtacgtaaaaagtacccgcaggcgcaggtttcccgcgttgccggtgccgatctctgggaagagctgatggcgcgcgcaggcaaagaagggacgccggtatttcttgtgggcggtaaacctgaagtgctggcgcaaactgaagctaaactgcgcaaccagtggaatgtgaatatcgttggcagtcaggatggttattttaaacccgagcagcgtcaggcgctgtttgaacgcattcatgccagcggtgcgcaaatcgtcaccgttgcgatgggaagcccaaagcaggagatcatcatgcgcgactgccgtctggtacatccagatgcgctgtatatgggcgttggcgggacttacgatgttttcaccggtcacgtaaaacgcgcaccgaaaatctggcaaacgctggggctggagtggctctaccgcctgcttagccagccgagccgcattaagcgtcagcttcgtttgctgcgttatttacgctggcactacaccggcaacctatgattttcctctctttgtaaagcgacggagtggtcactccgtcgcctgtctgcttttttattacacaaagcattcaaatttttaatgctttatttgccatttctcctgaattacgaaaacatttgcaacactcgatgtacccataacgataaccggtaacaccggaaagcatgcaaacacaacacgaggatttatggcagataacaaaccagagctacagcgtgggctggaagctcgacatatcgaactcatcgccctggggggcaccattggcgtcggcctgtttatgggggccgccagtaccctgaaatgggccgggccatccgtattgttggcctatatcatcgccgggctgttcgtctttttcatcatgcgtagtatgggcgaaatgttgttcctcgaaccggttaccggtagcttcgccgtttatgcgcatcgttatatgagcccgttctttggctatctcaccgcctggtcttactggtttatgtggatggcggtggggatctctgaaatcaccgccattggcgtttatgtccagttctggttcccggagatggcgcagtggatacccgcattgatcgcagtggcgctggtggcgttggcgaatctggcggcggtgcggttgtacggcgaaatcgagttctggttcgcgatgatcaaagtcaccacgattatcgtgatgattgtcattggcctgggcgtgattttctttggctttggcaatggcgggcagagcattggttttagcaatctcacagagcatggcggtttctttgcgggtggctggaaagggttcctgaccgctctgtgtattgtggtggcgtcctaccagggcgtggagctgattggcattactgccggtgaagcgaagaatccgcaggtgacgctgcgcagtgccgtaggcaaggtgctgtggcggatcctgattttctacgtaggcgcgattttcgttatcgtcaccatcttcccgtggaatgaaataggcagcaacggcagcccgttcgtactgacttttgccaaaatcggtattaccgcagcggcgggcattatcaactttgtggtgctgacggctgcgctctctggctgtaacagcggcatgtacagttgcggacgtatgctctacgcactggcgaaaaaccgtcagttaccggcggcaatggcgaaagtttcccgtcacggcgtaccggttgcgggtgtggcagtatctattgctattctgctaattggcagttgcctgaactacatcattcccaatccgcagcgtgtgtttgtctacgtctacagtgccagcgtgcttccggggatggtgccatggtttgtgatattgataagccagctgcgttttcggcgtgcacataaagcggcgattgccagccatccgttccgcagtatcctgttcccgtgggccaattacgtaacaatggcattcctgatttgcgttttgatcggcatgtactttaatgaagatacgcgtatgagcctgtttgttggcatcatctttatgctggcggtgacggcgatttataaagtttttggccttaatcgccacgggaaagcgcataaactggaggaataagcagcaaaacgcacaaaccgtaaccaaacgcgcaatttatttaaaaagggactagacagaggggtgggaagtccgtattatccacccccgcaacggcgctaagcgcccgtagctcagctggatagagcgctgccctccggaggcagaggtctcaggttcgaatcctgtcgggcgcgccatttagtcccggcgcttgagctgcggtggtagtaataccgcgtaacaagatttgtagtggtggctatagctcagttggtagagccctggattgtgattccagttgtcgtgggttcgaatcccattagccaccccattattagaagttgtgacaatgcgaaggtggcggaattggtagacgcgctagcttcaggtgttagtgtccttacggacgtgggggttcaagtccccccccccctcgcaccacgactttaaagaattgaactaaaaattcaaaaagcagtatttcggcgagtagcgcagcttggtagcgcaactggtttgggaccagtgggtcggaggttcgaatcctctctcgccgaccaattttgaaccccgcttcggcggggttttttgttttctgtgcatttcgtcaccctcccttcgcaataaacgcccgtaataactcattgccccacggtatgatttcgcccttaacgtattgaaggatgacttcaggcaaggagcgaccatgctgcaacaggttccaacgcgtgcttttcatgtgatggcgaaaccgagcggttccgattgtaatctgaactgtgactactgtttttatctcgaaaaacaatccctttaccgcgaaaagccagtcacgcatatggacgatgacacgctggaagcgtatgtccgtcactatatcgctgccagcgaaccgcaaaacgaagtggcttttacctggcagggcggcgaaccaacgctactcgggctggcgttttaccgccgtgccgtagcgctacaggcgaaatatggtgctggcaggaagataagtaacagcttccagactaacggcgtgctgctggatgacgaatggtgcgcgtttctcgcggagcatcattttcttgttggtttaagcctggatggcccgcctgagatccacaatcaatatcgcgtgactaaaggtggcagacccacgcataagctggtgatgcgtgccctgacgctcctgcaaaaacatcatgtcgactataacgtgctggtctgcgttaatcgcaccagcgcgcagcaaccgttgcaggtatatgattttttgtgcgatgcgggagtcgaattcatccagtttattccggtggtcgagcgcctggctgatgaaacaactgcccgcgatggacttaagttacatgcgcctggtgatattcagggtgagctaacggaatggagcgtgcgccccgaggagttcggtgagtttctggtggcgatattcgaccactggatcaaacgcgacgtcggcaagattttcgtgatgaatatcgaatgggcgtttgccaattttgtcggtgcgccgggtgcggtttgccatcatcagccaacctgtgggcgcagcgtgattgttgagcacaacggcgacgtttacgcctgtgatcactatgtttatccgcaatatcggctggggaatatgcaccagcaaacaattgcagaaatgatcgattccccgcaacagcaggcgtttggtgaagataaatttaagcagttaccggcgcagtgtcgcagttgtaacgtgttaaaagcgtgctggggaggctgcccgaaacaccgcttcatgctcgatgccagcggcaaaccgggactgaattatttgtgtgccgggtatcagcgttatttccgccatctaccgccatatcttaaagcaatggctgatttgctggcgcacggtcgcccggccagcgacattatgcatgcgcatttgctggtggtgagtaagtaaaaatcggcggccgcctgcggttgattgccggatgcggcgtaaacgccttatccggcctacatgatcgtgcaaattcaataaattgcagcgttctgtaggctggataagatgcgtcagcatcgcatccggcaaaggcagatctcagcgatagcgccggcttagtcagatttaatctgcgcgcgtggtggatattttttcaggatctccatatacgcgtgcatttcggtctgtagcggtacacccatcggaatatggcgcacgccgatggagtcgctttcctgcggatcggtgtagaggttaaacacgctgcttcccgccgtttgcattactgtgccggtgaatccaccctgatatccgctctgggtataagcgtaaggttgctgaatcaggacgtgatacttgaactcatccatacgcacagcagcgagtttaccgttgaggaagtagtgctcggccttacggttagactgaccatttgttcccaggaagaaggatgtctggtccacaccatcgataaaggtggttttcggcactaaattcgccactttcgctccaggatgccctgccagatccagcgcggtagggaagagatctgccagatcgacaataccgtcagatttacgcggttggatcatccctttccagtaaacgaaagtcggtacgcgaacgccgccttcccaggtgctacctttcgcaccacggaacggggtgcgtccgtgcggcggtacttcggcttccggtccgttatcggaggtaaagacgatcagcgtgttatcaagctgaccgtttttctccagtgttttatacagattagcgaacacatcgttcatctccaccatgcagtcgccatagctggtgcgtgccggagagctacccgcatatttcgcatttgggtagttatcgaagtggcagccacgagtgccgtagtagaggaagaatggtttatcgctcttcgccatcttgtcgaggaacttaacgccatagtccatccagcgttgatccagatcttccatatatttcggcgtaatgtcggcaatggcctgttgttcgccgccgcgcaccgcatgaacgtcatctttgctgaacggtaattgcttgatgtattcagaacggtccggactcagggccacttccggattgacgtgaacgtcgcgccattcggtgtacatatcagacacgctgttaaagccacggaaatcatcaaagccaacgttctgcggctggctctctttgttttcccccatatgccattttccgatggcctgagtgacgtagccctgatcgtgcagcaactgcggcagcgtggttaacccttgcagcccgcccggttgcccgtacattggcggcatcagaatgccgtggtggatggagtattgtccggtgagaatggtggcgcgggttggggaagagcttggttgagaatacgcgctagttaaaatcagcccctggctggcaacggcgtcgatatctggtgtagggttacccaccgccacgccgccaccgttaaaaccgacgtccatccagcccacatcgtccagcaagaaaacaaccacattcggtttcttaccggtttttttctcaagttctgccagcttctgctgggtttctttatcctgcgccggatgctgcattactggcatcatattgtcggcaatagtggtcgccggtttaaccagatactggtttgggtgatcgtatccggcaaagcctttgcgtgcggtggcagtactcggggtatctgctgcgctggccatgagaggaagagcggcggcgacagcaacaacaagacgtttgggactaaagctaaattccatgcaaaatgctccggtttcatgtcatcaaaatgatgacgtaattaagcattgataattgagatccctctccctgacaggatgattacataaataatagtgacaaaaataaattatttatttatccagaaaatgaattggaaaatcaggagagcgttttcaatcctacctctggcgcagttgatatgtaaggcaggtttattatatcgcgttgattattgatgctgtttttagttttaacggcaattaatatatgtgttattaattgaatgaattttatcattcataataagtatgtgtaggatcaagctcaggttaaatattcactcaggaagttattactcaggaagcaaagaggattacagaattatctcataacaagtgttaagggatgttatttcccgattctctgtggcataataaacgagtagatgctcattccatctcttatgttcgccttagtgcctcataaactccggaatgacgcagagccgtttacggtgcttatcgtccactgacagatgtcgcttatgcctcatcagacaccatggacacaacgttgagtgaagcacccacttgttgtcatacagacctgttttaacgcctgctccgtaataagagcaggcgtttttttatgtatcaggaaggccccggaggtgcttgcctccgggtgagaaggaattactgtggcgggttattctgcaacgttaacatcaaaccgtcgcgacgcatagctgcagcttcttccggcttgtgcagtctgtccagcgcgtcggcaagccatgcgtaatcgtaggcgtccggacgttgtttcagcgctgcgcggaaggcgaggcttgcttcctgccattctccgtgcttcatcagactctggcccagtgtgctccacaacagcgggcgatcgccgacgtttttgatttgctggcgcagcactttttccagctgttccggattgtttgttttcagtcgaggaatcggcagcagtaggcgatcgtcgtactggcgtttcaggccatcgatgataatttgctgggcagtatcatgatcgtcacattcaataagatgttccgccattgccacctgcaacgctacctgatgacgcgttttccggctttggtttttccaccagttacgcaaaccttcgctaccgttatcggcacgcgcctgatccatcaggccaatccatgcctgttgttccagcattgcacgatgttcttcatcaccaacatgggctttcgccatacttgggataatatccagcaggctactccatgcacctgtgcggatatacgcctgttccgccagacgtaatacttccggatggcgtggcgtaacttccagcagcttatccacgccgtggcgtgcagcatggttttcattacgggccagttgcagacgtacgcgggtgatttctaccggaatggtgtcgttgccggccagctccgctgcgcgttccagatgttggttggcgcgtgcttcatcaccacgttgttgcgcggcttcggcagccagtagatagttcaccaccggttgttccgcgtgatcggcatttttcgccatcagcttttcaacttgctgataatcgccttccgccagtttcagcagcgcctgttcggtctgcttacgtgcacggcgacgcttacgtccgacaaaccacccacgggtgtgcgcgccagtgcggaagatccgccgcagtagccactcaatggcaaacagcactaccatcgccagaatcaatatgatcgccaggcccgtgacgctggtttcgatattgtagttgtcggtctggatcagcacataaccctgatggccggcaatcatcgggccaaccacgatccccgcaatcagcaacacaaagagcaataacacttttagcatggttattctccttgcggcgcggctgccggagtatcagcttgcggtgcaggtgcaggtttagcttccgttgtccccgctgccggttgtgccagcaggttacgcacgcgagtctgcatcagtttttccagcatcgcctggctttgcagggtttccggaagatccatgctgatattttgctggcttaactggtccacctcgtcgaggaacgctttggtggtggcatcatcagtatcgtagtaagcacgtacccaggtggagacgttctccagcgcctggcgataagtctcttcctggtgacgcggtacagcttgtgctgcgaccagcaggcgagagcgaatattttcgcgcagatagatatcctgatttggcgctaacagcggtacggcggtgtcatcacgacggcgaatcgtaatgaagttgtccataaagttctgccagcttttttgcagattgatacgccattcgctgatggaactggaaagctcttcaccgtcactatccatcgggctaccatcgctgtcattatcggccagacgcaggttatctacctgattactaagctgattaagcttaaggatgatgccgtcataatccacctggcttactgcagaaaggctggcgatatcatcggtaattgcccgacgaacggtaatcagactcgggtcattcatatccgccaggctggcgtctgcacttttcagcaacgctgcagcggtcgtgacgtcctgatcgctccacagcttccgtccggcgagtttcaccagaaaatcggcctgagccagcagccaggttttagcatcgctgccggaaatggtggcgaccttttgttggacttcatccaactgttttgccagcgtttcttgctgacgattcgcctgcttaagttgtgcagcttgttgcttaataatgccttccagctcggctttttggctctcctgggctttttgcaatgccgtcagttggttagccagggcatcgctggtggcggtctgattgacggcctgttgtttaccccagccatacaaaccgatgcccgccgccagagcaatagcgatagccaccgcgctgagaatcaatgcggtattgttcttactctttttttctgttgcgacaggttgactcgtggtgtccacggcctccctggtctcttcaaccacggcggaggttttttcttgttccgtcattatggcttcctgttatgagagttattgtaatgcccgtaaaagcgcatcgttgtcagcgttatcggcgaccttaatgtcttgccagcccagttcccgggcgagtttcgccaaacgctcactgacgaccaatagtcgacagtgtagtaaccagtgctcacgataccattgtgggatcaggctccagagttgctgcaacatttcaccgctggtaacaacgaccatcgtcacctcgcgggcttgccagcgcatcgcttcttctgcaccatcgtaatggattgcgcatcgttgataacattcacaaaaagtgacctcagcaccgcgcgccgtcagggtatccccaattagctcacgaccaccattgccacgtaatatcagcgcacgtttgcccgcaatattttgtaattcaggtaattgtagcaagacttcgctgatttcccgatcctgcgggtagagaatcttctgtccacttacggtatgtagtgccagtgcggtggtgcgtccaatggcgaaataatcaggtagtcggggccatttacgatcttgctgatgcagctgactttgggcaaaagcaaccgcgtgttggctgagggcaaacaacagatcgctctcccccagcgctgccagttgatcagcaagttgcggtaattgttgacccggagaaaactcaatcagcggaaaatgccaggccacctgccccagtgtgcgcagacggctcactaactcttctccagcgggagacgggcgggtgacaaggatactcatgccggggcgtctccgttatagacttcagcgaggatctcgcgcgcgccgttattcagtagctcttctgccaggctaatccccatttgttcggcatcttgcggcgcaccgcggcgttcaccgcgaataatctggctaccgtccggcgcgccgaccagcgcacgcagccagatttcgccatcaataagctcggcgtagctaccaattggcacctgacatccgccttcgagacgggtattcatggcgcgttctgcggtaacgcgcagtgcagtttcgtggtgattcagcgcggcaagcagctcgcgagtgcgactatcatcaaggcggcattcaatacccaccgcaccttgtcctaccgccggaagagaaatctcgggtggcaacgcggcgcgaatacgactctccagacctaaacgttttagtccggctacggcaagaatgatggcatcgtattcgccgttatccagtttgctcaggcgagtgccgacgttgccgcgcagggagcggataatcagatccggacggcgttcagccagttggcactggcgacgtaaactggacgtcccgacgatactgcctgccggtaacgcatccagactgtcatagttattggacacaaaggcatcgcgaggatcttcacgctcacaaatagtgaccagtcccagaccttgcgggaattcaaccggcacatctttcatactgtgtacggcgatatcggcgcgattttcgaggagcgcgacttccagctcttttacaaataagccttttccgcctactttcgccagcggcgtatcaagaatcacatcgccgcgcgtcaccatcggtaccagttcaacgaccaggcccggatggctcgccatcaacttgtctttgacatagtgtgcctgccagagtgcaagtgggctttggcgtgtggcaattcttaaaacattgtctaacatgcttgttaccgtcattatcatccgtggtccatcctaacatccttgccagagtgatgtcagtgttgtggtgaaacgtagacgcctgcgcaaaccgtaaaatgaggtctggcagtggatcctgacaggcgtttcacgccgttgtaataaggaatttacagagaataaacggtgctacacttgtatgtagcgcatctttctttacggtcaatcagcaaggtgttaaattgatcacgttttagaccattttttcgtcgtgaaactaaaaaaaccaggcgcgaaaagtggtaacggttacctttgacatacgaaatatcccgaatgccgcgtgttaccgttgatgttggcggaatcacagtcatgacgggtagcaaatcaggcgatacgtcttgtacctctatattgagactctgaaacagagactggatgccataaatcaattgcgtgtggatcgcgcgcttgctgctatggggcctgcattccaacaggtctacagtctactgccgacattgttgcactatcaccatccgctaatgccgggttaccttgatggtaacgttcccaaaggcatttgcctttacacgcctgatgaaactcaacgccactacctgaacgagcttgaactgtatcgtggaatgagtgtacaggatccgccgaaaggtgagcttccaattactggtgtatacaccatgggcagcaccagctccgtagggcaaagttgttcctctgacctggatatctgggtctgtcatcaatcctggctcgatagcgaagagcgccaattgctacaacgtaaatgtagcctgctggaaaactgggccgccagcctgggtgtggaagtcagcttcttcctgattgatgaaaaccgcttccgtcataatgaaagcggcagcctggggggcgaagattgtggctccacccagcatatactgctgcttgacgaattttatcgtaccgccgtgcgtctcgccggtaagcgtattctgtggaatatggtgccgtgcgacgaagaagagcattacgacgactatgtgatgacgctttacgcgcagggcgtgctgacgccaaatgaatggctggatctcggtggcttaagcagcctttctgctgaagagtactttggtgccagcctttggcagctctacaagagtatcgattccccatacaaagcggtactgaaaacactgctgctggaagcctattcctgggaatacccgaacccacgtctgctggcgaaagatatcaaacagcgtttgcacgacggcgagattgtaagctttggtctcgatccatactgcatgatgctggagcgtgttactgaatacctgacggcgattgaagattttacccgtctggatttagtacgtcgctgcttctatttaaaagtgtgcgaaaagctcagccgtgaacgcgcctgcgtaggctggcgtcgcgcagtgttgagccagttagtgagcgagtggggttgggacgaagctcgtctggcaatgctcgataaccgcgctaactggaagattgatcaggtgcgtgaggcgcacaacgagttgctcgacgcgatgatgcagagctaccgtaatctgatccgctttgcgcgtcgcaataaccttagcgtctccgccagtccgcaggatatcggcgtgctgacgcgtaagctgtatgccgcgtttgaagcattaccaggtaaagtgacgctggtaaacccgcagattagtcccgatctcagcgaaccgaatctgacctttatttatgtgccgccgggccgggctaaccgtagtggttggtatctgtataaccgcgcgccaaatattgagagcatcatcagccatcagccgctggaatataaccgttacctgaataaactggtggcgtgggcatggtttaacggcctgctgaccagccgcacccgtttgtatattaaaggtaacggcattgtcgatttgcctaagttgcaggagatggtcgccgacgtgagccaccatttcccgctgcgcttacctgcaccgacaccgaaggcgctctacagcccgtgtgagatccgccatctggcgattatcgttaacctggaatatgacccgacagcggcgttccgcaatcaggtggtgcatttcgatttccgtaagctggatgtcttcagctttggcgagaatcaaaattgcctggtaggtagcgttgacctgctgtaccgcaacagctggaacgaagtgcgtacgctgcacttcaacggcgagcaaagcatgatcgaagccctgaaaactattctcggcaaaatgcatcaggacgccgcaccgccagatagcgtggaagtcttctgttatagccagcatctgcgcggcttaattcgtactcgcgtgcagcaactggtttctgagtgtattgaattgcgtctttccagcacccgccaggaaaccgggcgtttcaaggcgctgcgcgtttctggtcaaacctgggggttgttcttcgaacgcctgaatgtaagcgtacagaaactggaaaacgccatcgagttttatggcgcgattagccataacaaactgcacggcctgagtgtgcaggttgaaaccaatcacgtcaaattaccggcggtggtggacggctttgccagcgaagggatcatccagttctttttcgaagaaacgcaagacgagaatggctttaatatctacattctcgacgaaagcaaccgggttgaggtatatcaccactgcgaaggcagcaaagaggagctggtacgtgacgtcagtcgcttctacagcagtagccatgaccgttttacctacggcagtagcttcatcaacttcaacctgccgcagttctatcagattgtgaaggttgatggtcgtgaacaggtgattccgttccgcacaaaatctatcggtaacatgccgcctgccaatcaggatcacgatacgccgctattacagcaatattttagctgatgaacgtgccggaaagcgaggcttatccggcatgcaatcttagcggaaactgactgtttcacccgcctgctgcgtcgccgcctgttccagcaaatcccagaaggtttcgccgctgcgatcacaaatccactcatcgcctttcaggtcaaaatggtagccgccctgtttggttgccagccatacctggtgcagcggctcctggcggttgataatgattttgctgccattctcaaaggtaatggtcagtacgccgccgttgatttcgcagtcgatatcgctgtcgccatcccagtcgtccaggcgttcttcaatggtcagccagagttgatcagccaggcgatgaaattcactgtcgttcattgttgtatcctgtttttaagtgatggcggcagtatagcggcatggggtcagggcttcaaagtttgcacctctgcggctgcgttccggcacgatagttccgtcaccggaataatgatgtctctgtgtagcgaaagatttgtctctagtttagggcgcagttacaccacgtctttccctgtttctggtaaacattatgatcaggtttaccgagcgagcatcctcacgctgacggaactaaaaaagacaacaaacaaaccacattgcgatagtgcataaagccatcctggcgcgaggtgccgatcacgaaactaccagcaaaacataaatccccacgagtaagcgttatactcgcagcatttcctcacttttcagacttcataaagagtcgctaaacgcttgcttttacgtcttctcctgcgatgatagaaagcagaaagcgatgaactttacaggcaatccataatgaaaaacgtgtttaaggcactcactgtattacttactctcttcagcctgacgggctgcggtctgaaaggtccgctctatttcccgcctgcagataaaaacgcaccgccgccgaccaaaccggtagagacgcaaacgcaatccacggtgccggataaaaacgatcgcgccactggcgatggtccatcccaggtgaattactaaaagtcagtttctgtacccgcgtgattggagtaaatgatgcagttcagcaaaatgcatggccttggcaacgattttatggtcgtcgacgcggtaacgcagaatgtcttttttagtccggagctgattcgtcgcctggctgatcggcacctgggggtagggtttgaccaactgctggtggttgagccgccgtatgatcctgaactggattttcactatcgcattttcaatgctgatggcagtgaagtggcgcagtgcggcaacggtgcgcgctgctttgcccgttttgtgcgtctgaaaggactgaccaataagcgtgatatccgcgtcagcaccgccaacgggcggatggttctgaccgtcaccgatgatgatctggtccgcgtaaatatgggcgaacccaacttcgaaccttccgccgtgccgtttcgcgctaacaaagcggaaaagacctatattatgcgcgccgccgagcagacaatcttatgcggcgtggtgagcatgggaaatccgcattgcgtgattcaggtcgatgatgtcgataccgcggcggtagaaacgcttggtcctgttctggaaagccacgagcgttttccggagcgcgccaatatcggttttatgcaagtggttaagcgcgagcatattcgtttacgcgtttatgagcgtggggcaggagaaacccaggcctgcggcagcggcgcgtgtgcggcggttgcagtagggattcagcaaggtttgctggccgaagaagtacgcgtggaactccccggcggtcgtcttgatatcgcctggaaaggtccgggtcacccgttatatatgactggcccggcggtacatgtctacgacggatttattcatctatgaagcaaccaggggaagaactgcaggaaacactcacggagcttgatgaccgggcggttgtcgattatctgattaaaaatcctgagttttttatccgtaatgcgcgcgcagtagaagcgatacgtgtgccgcatccggtacgcggcaccgttagcttggtcgagtggcacatggcccgcgcacgtaatcatattcatgttctggaagagaacatggcgctgttgatggaacaggctatcgccaacgaaggcctgttttatcgcctactctacctgcagcgcagtctcaccgccgccagcagtctcgacgatatgctgatgcgctttcaccgctgggcgcgcgatctcggcctggcaggtgcgagtctgcgcctgtttccggatcgctggcgcttaggtgcgccgagcaaccacactcatctggcattaagccgtcagtctttcgaaccgctgcgtattcagcgtttggggcaggaacagcactatcttgggccgcttaacggaccagagctgctggtggtgctaccggaagcgaaagcggtgggaagcgtggcgatgagcatgctgggaagcgatgctgatttgggtgtcgtgctgtttaccagtcgcgatgccagtcactatcaacaagggcaaggaacgcagttacttcatgaaattgcgctgatgttgccggagcttctggagcgttggattgaacgcgtatgaccgatttacacaccgatgtagaacgctacctacgttatctgagcgtggagcgccagcttagcccgataaccctgcttaactaccagcgtcagcttgaggcgatcatcaattttgccagcgaaaacggcctgcaaagctggcagcaatgtgatgtgacgatggtgcgcaattttgctgtacgcagtcgccgtaaagggctgggagcagcaagtctggcgttacggctttctgcgctacgtagcttttttgactggctggtcagccagaacgaactcaaagctaacccggcgaaaggtgttagcgcaccgaaagcgccgcgtcatctgccgaaaaacatcgacgtcgacgatatgaatcggctgctggatattgatatcaatgatcccctcgctgtacgcgaccgtgcaatgctggaagtgatgtacggcgcgggtctgcgtctttctgagctggtggggctggatattaaacacctcgacctggagtctggtgaagtgtgggttatggggaaaggcagcaaagagcgccgcctgccgattggtcgcaacgctgtggcgtggattgagcactggcttgatttgcgcgacctgtttggtagcgaagacgacgcgctttttctgagcaaactgggcaagcgtatctccgcgcgtaatgtgcagaaacgctttgccgaatggggcataaaacaagggctgaataatcacgttcatccgcataaattacgtcacagcttcgccacgcatatgctggagagcagcggcgatcttcgtggtgtgcaggagctgctgggtcatgccaacctctccaccacgcaaatctatactcatcttgattttcaacaccttgccagcgtgtacgatgcggcgcatccacgcgccaaacgggggaaataatgcgtttttaccggcctttggggcgcatcagcgcgctcacctttgacctggatgataccctttacgataaccgtccggtgattttgcgcaccgagcgagaggcgcttacctttgtgcaaaattatcatccggcgctgcgcagcttccagaatgaagatctgcaacgcctgcgccaggcggtacgggaagcggaacccgagatttatcacgacgtgacgcgctggcgttttcgtagcattgaacaagcgatgctcgacgccgggctgagtgccgaagaagccagtgcaggcgcacacgcagcaatgatcaactttgccaaatggcgcagccgaatcgacgtcccgcagcaaactcacgacaccttaaaacagctggcgaagaaatggccgctggtggcgatcaccaacggtaacgcccagccggagctgtttggtttgggggattattttgagtttgtgctgcgcgctggcccgcacgggcgcagtaaaccgttcagcgatatgtactttttggctgcggaaaaactcaacgtgccgatcggcgagatcttacatgttggggacgatctcaccactgacgtgggtggggcaattcgcagcggaatgcaggcttgttggatcagaccggaaaatggcgatctgatgcaaacctgggacagccgtttactgccgcatctggaaatttcccggttggcatctctgaccagcctgatataatcagcaaatctgtatatatacccagctttttggcggagggcgttgcgcttctccgcccaacctatttttacgcggcggtgccaatggacgtttcttacctgctcgacagccttaatgacaaacagcgcgaagcggtggccgcgccacgcagcaaccttctggtgctggcgggcgcgggcagtggtaagacgcgcgtactggtgcatcgtatcgcctggttgatgagcgtggaaaactgcagcccatacagcattatggcggtgacgtttaccaacaaagcggcggcggagatgcgtcatcgtatcgggcaactgatgggcacgagccagggcggtatgtgggtcggcaccttccacgggctggcgcaccgtttgctgcgtgcgcaccatatggacgccaatctgccgcaggatttccagatcctcgacagtgaagaccagctacgcctgcttaagcgtctgatcaaagccatgaacctcgacgagaagcagtggccgccgcggcaggcaatgtggtacatcaacagccagaaagatgaaggcctgcgtccgcatcatattcaaagctacggtaatccggtggagcagacctggcagaaggtgtatcaggcgtatcaggaagcgtgtgaccgcgcgggcctggtggacttcgccgagctgctgctgcgcgctcacgagttgtggcttaacaagccgcatatcctgcaacactaccgcgaacgttttaccaatatcctggtggacgaattccaggataccaacaacattcagtacgcgtggatccgcctgctggcgggcgacaccggcaaagtgatgatcgtcggtgatgacgaccagagtatctacggctggcgcggggcgcaggtggagaatattcagcgtttccttaatgatttccccggtgccgaaactattcgtctggagcaaaactaccgctctaccagcaatattctgagcgccgctaacgccctgattgaaaacaataacgggcgtctgggtaaaaaactgtggaccgatggcgcggacggtgagcctatttccctctattgcgcttttaacgaactcgatgaagcgcgttttgtggttaaccgcatcaaaacctggcaggacaacggcggagcgcttgccgagtgcgccattctctaccgcagcaacgcccagagccgggtgctcgaagaggcgttattgcaggccagtatgccgtaccgtatttacggcgggatgcgcttcttcgaacgccaggaaatcaaagatgcgctcagctatctgcgcctgattgccaaccgcaacgacgacgcggcctttgagcgtgtggtgaatacgccaacgcggggtattggtgaccggacgctggacgtggtacgtcagacaagccgcgatcgccagttaacactctggcaggcatgtcgtgagctgttgcaggaaaaagccctcgccgggcgagctgccagcgccttgcagcgatttatggaattaatcgacgccttagcgcaggaaactgccgatatgccgctgcatgtacagactgaccgggtaattaaagactccggcctgcgtaccatgtatgagcaggagaagggcgaaaaaggtcagacgcgtatcgaaaacttagaggaactggtgacggcaacgcgccagttcagctacaacgaagaagacgaagatttaatgccgctgcaggcgttcctctcccatgcggcactggaagcaggtgaagggcaggcggatacctggcaggatgcggtgcagttgatgacgctacacagcgcgaaaggcctggagttcccgcaggtgtttatcgttggtatggaagagggcatgttcccaagccagatgagcctggatgaaggcgggcgtctggaagaagaacgccgtctggcctacgttggcgtaacccgcgcgatgcagaaactgacgctgacctacgcggaaacccgccgtctgtatggtaaagaggtttaccatcgcccgagccgctttatcggcgagctgccggaagagtgtgtggaagaggtgcgcctgcgcgccacggtaagccgcccggtcagccatcagcggatgggtacgccgatggtcgagaacgacagcggctacaagctcggccagcgcgtacgccacgctaagtttggtgaaggcaccattgtcaatatggaaggcagcggtgagcatagccgtttgcaggtggcatttcagggccagggtattaaatggctggtggcggcatacgcccggctggagagcgtgtaacgttgccggatgcggtgctgcgcaccttatttggcctaaaaaatcattcagattcaataaattgcaacgtcatgtaggccggatagggcgtttacgccgcatccggcatctgcgccatcttcagtatctgacacaaaactatcgttttaacctttccgctcgacggaaatcatggtgacaaaaggatagcgttgccacgggattgccccgcctttcatatacatatgactaatcgtgccatcaagataaagcagctgctcaacgttcagtttcgctttggcataacaggcaaaatcataaaaatttgttgcctgctggctcaacaaaaacacggcgttcccatgtttattaatcccaacaccgttacgaattttgctactggcgacgttgggatgaatacgcggattaattacaccgttttccatcaacattggcccactctgcaccgcaaactgaatctctttactggttttgaaggcatccagacgaacgatgccgactttatctcccgcgacataaaacacgccgccaggacggataaagaaattcccttcaccactagcgagatttaacgccaccttctgctgaccgttttcgatgtacaaaccgagcggcgcatagctttcatcatagatgccgccgttcatcgccatctgcacctgaccctgactattaatatccgccagcagagcatgtaacgttccccacgcttcgccattggctttttgccagtacattttcacccgctctgtttgaggattaacggtatacgcctgtacggtcagcgtcggatcactgagtgcgcaatcatcagcggcaacagcaaacaagggaagtaaggtgagggcgagaaaaatccgtttgagattcaaggtgatcattcctttaccaatgagtagctgatgcgccattataggtcctggatgtgggatttttttatcctgttagcgaccttgacgagtaccaaaaagcgcgaagttcaactattgttctgtggtgttctgttgcgtgttgacggcaaaattttgctggcgtaacatgcgcgcacgatcactctaagaggacattcgccttggacacacccagtagatactggctcactatcctgtcatccaggatcaactcctaaggctatccctttttgctgatagccttagcggttgtcagcgacctcaatttttcccgtcgcgctgagtcaggctgtttaatggtctgaaacccaatttgtttctgtgtgcccaccgaactgtccgatattttaagcattgggagtcccggtcatgctgagcgcatttcaactggaaaataaccgactgacccggctggaagtcgaagagagtcaaccccttgtaaatgcagtatggattgatcttgtcgaaccggacgacgacgagcgactgcgcgtacaatctgaacttggccagagcctggcaacccgcccggaactggaagacatcgaagcaagcgcacgtttctttgaagacgacgacggcctgcatattcactccttcttcttctttgaagatgcggaagatcacgccggtaactccactgtggcatttaccatccgtgatggtcgtctgtttactctgcgtgagcgtgaactgcccgcttttcgtctgtatcgtatgcgtgcccgtagccagagcatggtagacggtaacgcctacgagttgctgctggatctgttcgaaaccaaaatcgaacagttggcagatgaaattgaaaatatctatagcgacctggagcagttgagccgggtgattatggaagggcatcagggcgatgagtacgacgaggcgctctccactctggcggaactggaagatatcggctggaaagttcgcctgtgtctgatggatacccagcgcgcgctcaacttcctggtgcgtaaagcgcgtttaccgggtgggcaactggagcaggcgcgtgaaatcctgcgagatatcgaatccctgctgccgcataacgaatccctgttccagaaggtgaacttcctgatgcaggcggcaatgggttttatcaacatcgagcagaaccgcatcatcaaaatcttcagcgtggtatccgtggtattcctgccgccgacgctcgttgcttccagctatggcatgaactttgagtttatgccagaactgaagtggagcttcggctaccctggcgcgattatctttatgatcctcgcgggcctggcaccgtatctgtactttaagcggaagaactggttgtaaaaaacgagagcggtggcttagtctggctaagccacctgttattcaaaggctccaggtatttaacccttttacctctttctcatagaaccatttgttcgtgttaacagcaacataggctgctacggcaattcccagaatgttaacgccaattagtgcaccaacaaatagagatagaataccaagtaatagaactataattgcttttttccataaccccaggacaaataaatatatccaggaacagaagaaagcaatgaaattcatttgaatagttaagcgttgtcttacttttaatgctttaaatgctgctttatattctggtgttgccccccagaatccaggaaaaccatgttgatcataaaaattaaatcggtatttccatttttcacttaaactaccatcgttcatatattccttactcataaatactccataattattgtttactactatcagtaggtgcaagcattagcatactgaaagtggaaaaataacaaatcaaaaaaatcatgctaccattgccactacaggcaaaatcttcggctatcattgtgatgatagagatgatatatactgctaatgtaccaaaaacataagtttttatatagatgaaaccactatcacggagtcgctggcaattcatgttgatgacgagataatggagtacgatggtagagactataacaagaaagcctgcttctccatcgttaaaaaagataataagaaaggcaaaaatgaaatttattaaaataaaactaaatatataacgacgtctggaaatcttaccgttagatgttgggataaatatacgtaacataaattttacatccttgtatgagtctccggtcagcatggcaatatgcccactctcatgcaagagtcggcatattttttcagaatatatttattttttatttggacgttctacgctgcgtataaatcgcatccatcacaaaaattgccagcgccacccaaataaaggcgaaagtcaccatcttatcggcacccggtttttcaccataaaacgtcacagccagcaggaacatcagcgtcgggccaatgtactggaaaaagcctaacgtactgagacgcaagcgcgtggcagcggcggtaaaacacaacagcggtacggtagtgacaataccggcggcgatcagcagtaaattcaggctcatcgggttttgccccatatggctggtactgctgtcggcaatagcaaacaggtaaattgccgccacgggcagcagccacatggtttcgattaacatgccggtttgcgcttcaacggcaatcttcttgcgtaccagaccgtagaaggcaaaactaaatgccagtcccagcgcgataataggtaggctaccaaaagtccacagctggactaacacgccacatatcgccagaatcaccgccagccattgcatccggcggaatcgctcgccgaggaaaatcatccccagcacaatgttcaccagcgggttaataaagtaaccaaggctcgcttccagcatatggtgattgttcaccgcccagataaacagtagccagttgccaccaatcagcacggcagagactgccagcataaaaattttctgtggcgtctgaatcagcgtttttaaataggaccactggcggcaaatgctcatcagcaccaccataaagaaaaagctccagatcacgcgatgcgtcaggatttcatcggcgggcacgtagtaaatcaacttgaagtacgctggcgctataccccaaataaaataagcggcaagagcgagtaatacgccctgccgcgtttgttttgcatccatcgggaatactcatttttaattggtaacagcagtttacctgcttttatgtcttcaacctaccatataggtggcggtggcactggcaatataaagctgttcttcattgtgtaattcaacgcgggcgacggcgactttattgcctgcacgcaacaggctactagtagcagtaaaacgctcgcccctgcctgggcgcagataatcaacgcgaagatcaatggtccccatccggcttagccgctggcgtagttcatcttcactgatggtttcgtggcgggttaaggtacttcccacgcacaccagaccggcggcgacatccagcgcgctcgcaatgaccccgccgtgcaaaatgctttgcgcccagttgcccaccatcattggctgatttttaaaggccagctgtgcgaactctttttcgtaacgctccagttccatccccaatgcgcggttaaatggcatgtgataaacaaacatctcacccactaatttcagggcttgttcagcggtcagtacggcagacatatcatccttacacttcattggttaatgaaatgttgattttatgcttctttgttgttggtttctactttaggaagggataactaacggctatggagttaagtatgtaaaatagcccgcagaaaaatattcaccttatcaataattcgttacggagaacacgaccgatgcggactctgcagggctggttgttgccggtgtttatgttgcctatggcagtatatgcacaagaggcaacggtgaaagaggtgcatgacgcgccagcggtgcgtggcagtattatcgccaatatgctgcaggagcatgacaatccgttcacgctctatccttatgacaccaactacctcatttacacccaaaccagcgatctgaataaagaagcgattgccagttacgactgggcggaaaatgcgcgtaaggatgaagtaaagtttcagttgagcctggcatttccgctgtggcgtgggattttaggcccgaacagcgtgttgggtgcgtcttatacgcaaaaatcctggtggcaactgtccaatagcgaagagtctagtccgtttcgtgaaaccaactacgaaccgcaattgttcctcggttttgccaccgattaccgttttgcaggttggacgctgcgcgatgtggagatggggtataaccacgactctaacgggcgttccgacccgacctcccgcagctggaaccgcctttatactcgcctgatggcagaaaacggtaactggctggtagaagtgaagccgtggtatgtggtgggtaatactgacgataacccggatatcaccaaatatatgggttactaccagcttaaaatcggctatcacctcggtgatgcggtgctcagtgcgaaaggacagtacaactggaacaccggctacggcggcgcggagttaggcttaagttacccgatcaccaaacatgtgcgcctttatactcaggtttacagcggctatggcgaaagcctcatcgactataacttcaaccagacccgtgtcggtgtgggggttatgctaaacgatttgttttgatgaacggttgagtggttggcaaatctggaatccagcatccaggattaccctctcagagactaaaagcattgcagtttctcgcgcaggcgctgaaaatagcgcctgtttttatttcaggcaatcggggtgaatgtggcgcaggcggaagtgttgaatctggagtccggagctaaacaggttttacaagaaacctttggctaccaacagtttcgccccggccaggaagaaattatcgacactgtgctttccggccgcgattgcctcgtcgtcatgcccactggtggcggaaaatccctttgctatcaaatccctgccttattgctaaacggccttaccgtggttgttagtccgctgattagcttgatgaaagatcaggtggatcaactgcaagccaacggcgtggcggcggcgtgccttaacagcacgcaaacccgcgaacagcaacttgaagtgatgacaggctgccgcaccgggcaaattcgtctgctttatatcgccccggaacgcctgatgctggataactttcttgagcatctggcgcactggaatccggtgttattagccgttgatgaagcgcactgtatctcccaatggggccacgatttccgcccggaatatgccgcgctcggtcagttgcgccagcggttcccgacgctgccgtttatggcgctgaccgccacagccgacgacaccacgcgccaggatatcgtgcgcctgctggggctgaacgatccgctgattcaaatcagcagttttgaccgtccgaatattcgctacatgctgatggagaagttcaaaccgctcgatcagttgatgcgctacgtgcaggaacagcgcggtaagagtggcattatctactgcaacagccgcgcgaaagtagaagacaccgctgcgcgcctgcaaagcaagggaattagcgcggcggcctatcatgccgggctggaaaataatgttcgcgccgatgtgcaggaaaaattccagcgcgatgacctgcaaattgtggtggcgacggtggcgttcggcatgggcatcaataaaccaaacgttcgcttcgtggtccactttgatattccgcgcaatatcgaatcctattatcaggaaaccggacgcgccgggcgtgatggcctgcccgcggaagcgatgctgttttacgatccggctgatatggcgtggctgcgccgttgtctggaagagaagccgcaggggcagttgcaggatatcgagcgccacaaactcaatgcgatgggcgcgtttgccgaagcgcaaacttgccgtcgtctggtattgctgaactattttggcgaagggcgtcaggagccgtgcgggaactgcgatatctgcctcgatccgccgaaacagtacgacggtagtaccgatgctcagattgccctttccaccattggtcgtgtgaatcagcggtttgggatgggttatgtggtggaagtgattcgtggtgctaataaccagcgtatccgcgactatggtcatgacaaactgaaagtctatggcatgggccgtgataaaagccatgaacattgggtgagcgtgatccgccagctgattcacctcggcctggtgacgcaaaatattgcccagcattctgccctacaactgacagaggccgcgcgcccggtgctgcgcggcgaatcctctttgcaacttgccgtgccgcgtatcgtggcgctcaaaccgaaagcgatgcagaaaagcttcggcggcaactatgatcgcaaactgttcgccaaattacgcaaactgcgtaaaagcatagccgatgaaagtaatgtcccgccgtacgtggtgtttaacgacgcaaccttgattgagatggctgaacagatgccgatcaccgccagcgaaatgctcagcgttaacggcgttgggatgcgcaagctggaacgctttggcaaaccgtttatggcgctgattcgtgcgcatgttgatggcgatgacgaagagtaatcagcagcataaaaaagtgccagtatgaagactccgtaaacgtttcccccgcgagtcaaatgtatgttgatgttatttctcaccgtcgccatggtgcacattgtggcgcttatgagccccggtcccgatttcttttttgtctctcagaccgctgtcagtcgttcccgtaaagaagcgatgatgggcgtgctgggcattacctgcggcgtaatggtttgggctgggattgcgctgcttggcctgcatttgattatcgaaaaaatggcctggctgcatacgctgattatggtgggcggtggcctgtatctctgctggatgggttaccagatgctacgtggtgcactgaaaaaagaggcggtttctgcacctgcgccacaggtcgagctggcgaaaagtgggcgcagtttcctgaaaggtttactgaccaatctcgctaatccgaaagcgattatctactttggcagcgtgttcagtttgtttgtcggtgataacgttggcactaccgcgcgctggggcatttttgcgctgatcattgtcgaaacgctggcgtggtttaccgtcgttgccagcctgtttgccctgccgcaaatgcgccgtggttatcaacgtctggcgaagtggattgatggttttgccggggcgttatttgccggatttggcattcatttgattattagccggtgatgccagacgcgtcttcagagtaagtcggataaggcgtttacgccgcatccgacattatttttcacgcatgcctcgcgcttgctaacagcgctcccaccagcataaacaagctgccgaaaatcttattcagcgccttcatctgctttggtcctttaatccatagagcaatccgttgagcaagggtggcgtaaccgatcatcacaataatatcgaccacaatagtggtgacgccgagcacgatatactgcatcagttgcggctgttgcggcatgatgaattgcggaaatagcgccgccagaaacacaatacttttgggattggtgagattcacaaaaactgcgcgctggaacaaatgtcgacggctttgagtagaggccaggcttttaaggtcaattgcaccagcggcgcgccactgctggattcccagccaaatcaagtaagccgcgcctgcccacttcaacacttcaaacgcaatcacactgcgggaaaatagcgtccccaaccccacgccaaccagcacaatatgaatcgccagtccggtctgaagcccagcaatagacgccaccgcgccgcgataaccgtggttgaggctggtggtcatagtgttgattgcaccagagcctgggctcaggcttaaaatgatgcttgtcagcaggtaggcaaaccaccattctaaggtcatgatgaactcccggtgtgtctatttttgtgccacaatacgctactgtcgcagcgttgtgtcaggcacgctaaaaaaaacgattttacgtggtttaagaggcagattacccgatgtttcagcagcaaaaagactgggaaacaagagaaaacgcgtttgctgcttttaccatgggaccgctgactgatttctggcgtcagcgtgatgaagcagagtttactggtgtggatgacattccggtgcgctttgtccgttttcgcgcacagcaccatgaccgggtggtagtcatctgcccggggcgtattgagagctacgtaaaatatgcggaactggcctatgacctgttccatttggggtttgatgtcttaatcatcgaccatcgcgggcagggacgttccggtcgcctgttagccgatccgcatctcgggcatgttaatcgctttaatgattatgttgatgatctggcggcattctggcagcaggaggttcagcccggtccgtggcgtaaacgctatatactggcacatagcatgggcggtgcgatctccacattatttctgcaacgccatccaggtgtatgtgacgccattgcgctaactgcgccaatgtttgggatcgtgattcgtatgccgagttttatggcacggcagatcctcaactgggccgaagcgcatccacgtttccgtgatggctatgcaataggcaccgggcgctggcgcgcgttgccgtttgctatcaacgtactgacccacagcagacagcgatatcgacgtaacttacgcttctatgctgatgacccaacgattcgcgtcggtgggccgacctaccattgggtacgcgaaagtattctggctggcgaacaggtgttagccggtgcgggtgatgacgccacgccaacgcttctcttgcaggctgaagaggaacgcgtggtggataaccgcatgcatgaccgtttttgtgaactccgcaccgccgcgggccatcctgtcgaaggaggacggccgttggtaattaaaggtgcttaccatgagatcctttttgaaaaggacgcaatgcgcagtgtcgcgctccacgccatcgttgattttttcaacaggcataacagtcccagcggaaaccgctctacagaggtttaaatttcttatgtaccaggttgttgcgtctgatttagatggcacgttactttctcccgaccatacgttatccccttacgccaaagaaactctgaagctgctcaccgcgcgcggcatcaactttgtgtttgcgaccggtcgtcaccacgttgatgtggggcaaattcgcgataatctggagattaagtcttacatgattacctccaatggtgcgcgcgttcacgatctggatggtaatctgatttttgctcataacctggatcgcgacattgccagcgatctgtttggcgtagtcaacgacaatccggacatcattactaacgtttatcgcgacgacgaatggtttatgaatcgccatcgcccggaagagatgcgcttttttaaagaagcggtgttccaatatgcgctgtatgagcctggattactggagccggaaggcgtcagcaaagtgttcttcacctgcgattcccatgaacaactgctgccgctggagcaggcgattaacgctcgttggggcgatcgcgtcaacgtcagtttctctaccttaacctgtctggaagtgatggcgggcggcgttagtaaaggccatgcgctggaagcggtggcgaagaaactgggctacagcctgaaggattgtattgcgtttggtgacgggatgaacgacgccgaaatgctgagcatggcggggaaaggctgcattatgggcagtgcgcaccagcgtctgaaagaccttcatcccgagctggaagtgattggtactaatgccgacgacgcggtgccgcattatctgcgtaaactctatttaagctaatcgttctttatttggtcagttgtcaacctgatacttcgctacaatggatacccgttaatcaaagagttttccattgtggcgctacttatcatcaccacgattctgtgggccttctcctttagcttttatggcgagtaccttgcggggcacgtcgatagctattttgcggtgctggtgcgcgttggcctggcggcactcgtttttctgccgtttctgcgtacccgtggcaatagcctgaaaacggtcggcctgtatatgctggtgggcgcgatgcagcttggcgtgatgtatatgctgagtttccgcgcttatctctacctgacggtttccgagctgctgctgttcaccgtgctgacgccgctctacatcacgctgatttatgacatcatgagtaagcgccgtctgcgctggggctatgcctttagcgccttgctggcggtgattggtgccgggattattcgctatgatcaggtcaccgaccatttctggactggcttgctgctggtgcaactctccaatatcacttttgccattggcatggtgggttacaaacgcctgatggaaactcgcccgatgccacagcataacgcctttgcgtggttctatcttggcgcgtttctggtggcagtgattgcatggttcttgctgggaaatgcgcagaaaatgccgcaaaccacgctgcaatggggcattctggtgtttcttggcgtggtggcttccgggattggctactttatgtggaactacggcgcgacgcaggtggacgccggaacgctgggcattatgaataatatgcacgttccggcagggctgctggtaaacctggctatctggcaccaacagccgcactggccaacgtttattacaggcgcgctggtgatcctggccagtctgtgggtgcatcgtaagtgggtcgctccgcgctctagtcaaacggcagatgatcgcaggcgtgattgcgcgctgagcgaataattacaggcgcgctggacttcctggcctcactgtgggtgcatcgtaagtgggtcgctccgcgctcttcacaaacggcagatgatcgcaggcgtgattgcgcgcactgcgaataaacgcttccgtaactggctgacgctgctcgccatcgcgcacggcggcgtacagtcggctccacaagccttcgcccagggttttggtcaccaccagaccctggcgctcaaaactctctactacccaatgcggtagcgcggcaatacccatccgcgcggcaaccatctgaatcaacaataaggtgttatcgacgcttttcagactcgggctgacgcctgccggctgaagaaaatgccgccagacatccagtcgactacgctgcaccggataaattaatagcgtctcgctggcgagatcttccggtgtaattcgcgttttcgccgccagtggatggtcaggtgctaacaccagacgcacttcatagtcgaacatcgggctataatgcaggccactgcgcggcagaatatcggacgtcattaccagatccagctctccctgttgcaaggcgggctgcgggtcaaatgtcacgccgcttttaaaatccatctctacctgcggccagttcttatggaaattttctaacgcgggtgtcagccactgaatacagctatggcactcaatggcaatgcgcagacgcgtctgctgcggttcattgcaggcttgcagggcctggctaatttgcggcagtacctggtttgccagttgcaacaggatttctccctgcggtgtaaagcgtagcggctggctcttacgcacaaatagccggaagccaaggcgttgttccagatcgctaaactggtgagacagggcggattgcgtctgatgcaacgtcgccgcagcggctgcgaggctgccgcagttccgcaacgcttgtagcgttttcaggtgttttacttcgatcatgaaagtccttcacttcggcatgaataatttgcgcttgaggaatatacagtaaccgccaattatggatgtgtaaacatctggacggctaaaatccttcgtcttttaaatttatggtgcgttggctgcgtttctccaccccggtcacttacttcagtaagctcccggggatgaataaacttgccgccttccctaaattcaaaatccataggatttacatataattagaggaagaaaaaatgacaatattgaatcacaccctcggtttccctcgcgttggcctgcgtcgcgagctgaaaaaagcgcaagaaagttattgggcggggaactccacgcgtgaagaactgctggcggtagggcgtgaattgcgtgctcgtcactgggatcaacaaaagcaagcgggtatcgacctgctgccggtgggcgattttgcctggtacgatcatgtactgaccaccagtctgctgctgggtaacgttccggcgcgtcatcagaacaaagatggtagcgtagatatcgacaccctgttccgtattggtcgtggacgtgcgccgactggcgaacctgcggcggcagcggaaatgaccaaatggtttaacaccaactatcactacatggtgccggagttcgttaaaggccaacagttcaaactgacctggacgcagctgctggacgaagtggacgaggcgctggcgctgggccacaaggtgaaacctgtgctgctggggccggttacctggctgtggctggggaaagtgaaaggtgaacaatttgaccgcctgagcctgctgaacgacattctgccggtttatcagcaagtgctggcagaactggcgaaacgcggcatcgagtgggtacagattgatgaacccgcgctggtactggaactaccacaggcgtggctggacgcatacaaacccgcttacgacgcgctccagggacaggtgaaactgctgctgaccacctattttgaaggcgtaacgccaaatctcgacacgattactgcgctgcctgttcagggtctgcatgttgacctcgtacatggtaaagatgacgttgctgaactgcacaagcgcctgccttctgactggttgctgtctgcgggtctgatcaatggtcgtaacgtctggcgcgccgatcttaccgagaaatatgcgcaaattaaggacattgtcggcaaacgtgatttgtgggtggcatcttcctgcagcttgctgcacagccccatcgacctgagcgtggaaacgcgtcttgatgcagaagtgaaaagctggtttgccttcgccctacaaaaatgccatgaactggcactgctgcgcgatgcgctgaacagtggtgacacggcagctctggcagagtggagcgccccgattcaggcacgtcgtcactctacccgcgtacataatccggcggtagaaaagcgtctggcggcgatcaccgcccaggacagccagcgtgcgaatgtctatgaagtgcgtgctgaagcccagcgtgcgcgttttaaactgccagcgtggccgaccaccacgattggttccttcccgcaaaccacggaaattcgtaccctgcgtctggatttcaaaaagggcaatctcgacgccaacaactaccgcacgggcattgcggaacatatcaagcaggccattgttgagcaggaacgtttgggactggatgtgctggtacatggcgaggccgagcgtaatgacatggtggaatactttggcgagcacctcgacggatttgtctttacgcaaaacggttgggtacagagctacggttcccgctgcgtgaagccaccgattgtcattggtgacattagccgcccggcaccgattaccgtggagtgggcgaagtatgcgcaaagcctgaccgacaaaccggtgaaagggatgctgacggggccggtgaccatactctgctggagcttcccgcgtgaagatgtcagccgtgaaaccatcgccaaacagattgcgctggcgctgcgtgatgaagtggccgatctggaagccgctggaattggcatcatccagattgacgaaccggcgctgcgcgaaggtttaccgctgcgtcgtagcgactgggatgcgtatctccagtggggcgtagaggccttccgtatcaacgccgccgtggcgaaagatgacacacaaatccacactcacatgtgttattgcgagttcaacgacatcatggatagcattgcggcgctggacgcagacgtcatcaccatcgaaaccagccgttccgacatggagttgctggagagctttgaagagtttgattatccaaatgaaatcggtcctggcgtctatgacattcacagcccaaacgtaccgagcgtggaatggattgaagccttgctgaagaaagcggcaaaacgcattccggcagagcgcctgtgggtcaacccggactgtggcctgaaaacgcgcggctggccagaaacccgcgcggcactggcgaacatggtgcaggcggcgcagaacttgcgtcgggggtaaaatccaaaccgggtggtaataccacccggtcttttctcattacaggctcttcttcccaccatactgcttaaaccattccagcatacgctgccagccatcttctgcagatgcggcatgatagctcgggcgataatcagcgttgaatgcatgcccggcgtccgggtacacgataatctctgctttcgcattagcagcccgcagcgcctggcgcatggtttcaacgctctcctgcggaatgctgttatcctgaccaccatataagccgagaatcggcgcgttaagatcggttgcgatatcaacaggttgtttcggactattcaggctcttgtcgcccgtcagtttgccgtaccacgccactgcggcttttagctgtggattatgcgcggcatacagccaggtgatacgtccaccccagcagaatccggtgatcattaaacgatgaacatcgccgccgttgcgggaagcccaactggcgacatgatcgagatcggccagcacctggctgtcaggcacttttgctaccagaccgctaagcaacgtggggatatcggcaaaatcattcggatcgccttcgcggaagtaaagttcaggtgcgatagccagatacccctccagcgccagacggcgacaaatgtcgcggatatgttcatgcacgccaaaaatttcctgcactacaatgaccactggcagtgggccatcgctttgctttggtctggcatggtaagcaggcatgttatccccttgactagggatagaggtgaagcccgccacaatcgcgtcgtccggggtctgaacgatggtgctagcgagagggcttgcagcaggtgcaaatccagattgttgtgttgttgccatggtattctccgtacccttataaaaatgttgcgcaatgttaactatagtcagcatgcaacaaatcacattgcctgaatcggctcatcttttatgcagtcctgcagaatgaagggtgatttatgtgatttgcatcacttttggtgggtaaatttatgcaacgcatttgcgtcatggtgatgagtatcacgaaaaaatgttaaacccttcggtaaagtgtctttttgcttcttctgactaaaccgattcacagaggagttgtatatgtccaagtctgatgtttttcatctcggcctcactaaaaacgatttacaaggggctacgcttgccatcgtccctggcgacccggatcgtgtggaaaagatcgccgcgctgatggataagccggttaagctggcatctcaccgcgaattcactacctggcgtgcagagctggatggtaaacctgttatcgtctgctctaccggtatcggcggcccgtctacctctattgctgttgaagagctggcacagctgggcattcgcaccttcctgcgtatcggtacaacgggcgctattcagccgcatattaatgtgggtgatgtcctggttaccacggcgtctgtccgtctggatggcgcgagcctgcacttcgcaccgctggaattcccggctgtcgctgatttcgaatgtacgactgcgctggttgaagctgcgaaatccattggcgcgacaactcacgttggcgtgacagcttcttctgataccttctacccaggtcaggaacgttacgatacttactctggtcgcgtagttcgtcactttaaaggttctatggaagagtggcaggcgatgggcgtaatgaactatgaaatggaatctgcaaccctgctgaccatgtgtgcaagtcagggcctgcgtgccggtatggtagcgggtgttatcgttaaccgcacccagcaagagatcccgaatgctgagacgatgaaacaaaccgaaagccatgcggtgaaaatcgtggtggaagcggcgcgtcgtctgctgtaattctcttctcctgtctgaaggccgacgcgttcggccttttgtatttttgcgtagcgcctcgcaggaaatgcctttccaactggacgtttgtacagcacaattctattttgtgcgggtaagttgttgcgtcaggaggcgttgtggatttcagtatcatggtttacgcagttattgcgttggtgggtgtggcaattggctggctgtttgccagttatcaacatgcgcagcaaaaagccgagcaattagctgaacgtgaagagatggtcgcggagttaagcgcggcaaaacaacaaattacccaaagcgagcactggcgtgcagagtgcgagttactcaataacgaagtgcgcagcctgcaaagtattaacacctctctggaggccgatctgcgtgaagtaaccacgcggatggaagccgcacagcaacatgctgacgataaaattcgccagatgattaacagcgagcagcgcctcagtgagcagtttgaaaacctcgccaaccgtatttttgagcacagcaatcgccgggttgatgagcaaaaccgtcagagtctgaacagcctgttgagcccgctacgtgaacaactggacggtttccgccgtcaggttcaggacagcttcggtaaagaagcacaagaacgccataccctgacccacgaaattcgcaatctccagcaactcaacgcgcaaatggcccaggaagcgatcaacctgacgcgcgcgctgaaaggcgacaataaaacccagggcaactggggcgaggtagtattgacgcgggtgttggaggcttccggtctgcgtgaagggtatgaatatgaaacccaggtcagcatcgaaaatgacgcccgcagccggatgcagccggatgtcatcgtgcgcctgccgcagggaaaagatgtggtgatcgacgccaaaatgacgctggtcgcctatgaacgctattttaacgccgaagacgactacacccgcgaaagcgcgctacaggaacatatcgcgagcgtgcgtaaccatatccgtttgctgggacgcaaagattatcaacagctgccggggctgcgaactctggattacgtgctgatgtttattcccgttgaacccgcttttttactggcgcttgaccgccagccggagctgatcaccgaagcgttgaaaaacaacatcatgctggttagcccgactacgctgctggtggcgctgcgcactatcgccaacctgtggcgttatgagcatcaaagccgcaacgcccagcaaatcgccgatcgtgccagcaagctgtacgacaagatgcgtttgttcatcgatgacatgtccgcgattggtcaaagtctcgacaaagcgcaggataattatcggcaggcaatgaaaaaactctctagtgggcgcggaaatgtgctggcgcaggcagaagcgtttcgcggtttaggagtagaaattaaacgcgagattaatccggatttggctgaacaggcggtgagccaggatgaagagtatcgacttcggagcgttccggagcagccgaatgatgaagcttatcaacgcgatgatgaatataatcagcagagccgctaacccattgggagtagttaagccgggtagaaatctagggcatcgacgcccaatctgttacacttctggaacaattttttgatgagcaggcattgagatggtggataagagtcaagaaacgacgcactttggttttcagaccgtcgcgaaggaacaaaaagcggatatggtcgcccacgttttccattccgtggcaagtaaatacgatgtcatgaatgatttgatgagttttggtattcatcgtttgtggaagcgattcacgattgattgcagcggcgtacgccgtgggcagaccgtgctggatctggctggtggcaccggcgacctgacagcgaaattctcccgcctggtcggagaaactggcaaagtggtccttgctgatatcaatgaatccatgctcaaaatgggccgcgagaagctgcgtaatatcggtgtgattggcaacgttgagtatgttcaggcgaacgctgaggcgctgccgttcccggataacacctttgattgcatcaccattagctttggtctgcgtaacgtcaccgacaaagataaagcactgcgtagtatgtatcgcgtgctgaaacccggcggccgcctgctggtgcttgagttcagcaagccaattatcgagccgctgagcaaagcctatgatgcatactccttccatgtgctgccgcgtattggcagtctggtcgcgaacgacgccgacagctaccgttatctggcagaatccatccgtatgcatcccgatcaggataccctgaaagccatgatgcaggatgccggattcgaaagtgtcgactactacaatctgacggcaggggttgtggcgctgcatcgtggttataagttctgacaggagaccggaaatgccttttaaacctttagtgacggcaggaattgaaagtctgctcaacaccttcctgtatcgcagtcccgcgctgaaaacggcccgcagccgtctgctgggtaaagtattgcgcgtggaggtaaaaggctttagcacgagtttgattctggtgttcagcgaacgccaggttgatgtactgggcgaatgggcaggcgatgctgactgcaccgttatcgcctacgccagtgtgttgccgaaacttcgcgatcgccagcagcttaccgcactgattcgcagtggtgagctggaagtgcagggcgatattcaggtggtgcaaaacttcgttgcgctggcagatctggcagagttcgaccctgcggaactgctggccccttataccggtgatatcgccgctgaaggaatcagcaaagccatgcgcggaggcgcaaagttcctgcatcacggcattaagcgccagcaacgttatgtggcggaagccattactgaagagtggcgtatggcacccggtccgcttgaagtggcctggtttgcggaagagacggctgccgtcgagcgtgctgttgatgccctgaccaaacggctggaaaaactggaggctaaatgacgccaggtgaagtacggcgcctatatttcatcattcgcacttttttaagctacggacttgatgaactgatccccaaaatgcgtatcaccctgccgctacggctatggcgatacagtttattctggatgccaaatcggcataaagacaaacttttaggtgagcgactacgactggccctgcaagaactggggccggtttggatcaagttcgggcaaatgttaagtacccgccgcgatctttttccaccgcatattgccgatcagctggcgttattgcaggacaaagttgctccgtttgatggcaagctggcgaagcagcagattgaagctgcaatgggcggcttgccggtagaagcgtggtttgacgattttgaaatcaagccgctggcttctgcttctatcgcccaggttcataccgcgcgattgaaaagcaatggtaaagaggtggtgattaaagtcatccgcccggatattttgccggttattaaagcggatctgaaacttatctaccgtctggctcgctgggtgccgcgtttgctgccggatggtcgccgtctgcgcccaaccgaagtggtgcgcgagtacgaaaagacattgattgatgaactgaatttgctgcgggaatctgccaacgccattcagcttcggcgcaattttgaagacagcccgatgctctacatcccggaagtttaccctgactattgtagtgaagggatgatggtgatggagcgcatttacggcattccggtgtctgatgttgcggcgctggagaaaaacggcactaacatgaaattgctggcggaacgcggcgtgcaggtgttcttcactcaggtctttcgcgacagctttttccatgccgatatgcaccctggcaacatcttcgtaagctatgaacacccggaaaacccgaaatatatcggcattgattgcgggattgttggcagcctaaacaaagaagataaacgctatctggcagaaaactttatcgccttctttaatcgcgactatcgcaaagtggcagagctacacgtcgattctggctgggtgccaccagataccaacgttgaagagttcgaatttgccattcgtacggtctgtgaacctatctttgagaaaccgctggccgaaattagctttggacatgtactgttaaatctgtttaatacggcgcgtcgcttcaatatggaagtgcagccgcaactggtgttactccagaaaaccctgctctacgtcgaaggggtaggacgccagctttatccgcaactcgatttatggaaaacggcgaagcctttcctggagagctggattaaagatcaggtcggtattcctgcgctggtgagagcatttaaagaaaaagcgccgttctgggtcgaaaaaatgccagaactgcctgaattggtttacgacagtttgcgccagggcaagtatttacagcacagtgttgataagattgcccgcgagcttcagagtaatcatgtacgtcagggacaaagccgttattttctcggaattggcgctacgttagtattaagtggcacattcttgttggtcagccgacctgaatgggggctgatgcccggctggttaatggcaggtggtctgatcgcctggtttgtcggttggcgcaaaacacgctgattttttcatcgctcaaggcgggccgtgtaacgtataatgcggctttgtttaatcatcatctaccacagaggaacatgtatgggtggtatcagtatttggcagttattgattattgccgtcatcgttgtactgctttttggcaccaaaaagctcggctccatcggttccgatcttggtgcgagcatcaaaggctttaaaaaagcaatgagcgatgatgaaccaaagcaggataaaaccagtcaggatgctgattttactgcgaaaactatcgccgataagcaggcggatacgaatcaggaacaggctaaaacagaagacgcgaagcgccacgataaagagcaggtgtaatccgtgtttgatatcggttttagcgaactgctattggtgttcatcatcggcctcgtcgttctggggccgcaacgactgcctgtggcggtaaaaacggtagcgggctggattcgcgcgttgcgtagtctggcgacaacggtgcagaacgaactgacccaggagttaaaactccaggagtttcaggacagtctgaaaaaggttgaaaaggcgagcctcactaacctgacgcccgaactgaaagcgagcatggatgaactacgccaggccgcggagagcatgaagcgttcctacgttgcaaacgatcctgaaaaggcgagcgatgaagcgcacaccatccataacccggtggtgaaagataatgaagctgcgcatgagggcgtaacgcctgccgctgcacaaacgcaggccagtagcccggaacagaagccagaaaccacgccagagccggtggtaaaacctgctgcggacgctgaaccgaaaaccgctgcaccttcccctagcagcagtgataaaccgtaaacatgtctgtagaagatactcaaccgcttatcacgcatctgattgagctgcgtaagcgtctgctgaactgcattatcgcggtgatcgtgatattcctgtgtctggtctatttcgccaatgacatctatcacctggtatccgcgccattgatcaagcagttgccgcaaggtagtacgatgatcgccaccgacgtggccagcccgttctttacgccgatcaagctgacctttatggtgagcctgattctgagtgcgccggtgattctctatcaggtgtgggcatttatcgccccagcgctgtataagcatgaacgtcgcctggtggtgccgctgctggtttccagctctctgctgttttatatcggcatggcattcgcctactttgtggtctttccgctggcatttggcttccttgccaataccgcgccggaaggggtgcaggtatccaccgacatcgccagctatttaagcttcgttatggcgctgtttatggcgtttggtgtctcctttgaagtgccggtagcaattgtgctgctgtgctggatggggattaccagcccagaagacttacgcaaaaaacgcccgtatgtgctggttggtgcattcgttgtcgggatgttgctgacgccgccggatgtcttcagccaaacgctgttggcgatcccgatgtactgtctgtttgaaatcggtgtcttcttcagtcgcttttacgttggtaaagggcgaaatcgggaagaggaaaacgacgctgaagcagaaagcgaaaaaactgaagaataaattcaaccgcccgtcagggcggttgtcatatggagtacaggatgtttgatatcggcgttaatttgaccagtagccaatttgcgaaagaccgtgatgatgttgtagcgtgcgcttttgacgcgggagttaatgggctactcatcaccggcactaacctgcgtgaaagccagcaggcgcaaaagctggcgcgtcagtatagctcctgttggagtacggcgggcgtacatcctcacgacagcagccagtggcaagctgcgactgaagaagcgattattgagctggccgcgcagccagaagtggtggcgattggtgaatgtggtctcgactttaaccgcaactttagcacgccggaagagcaggaacgcgcttttgttgcccagctacgcattgccgcagatttaaacatgccggtatttatgcactgtcgcgatgcccacgagcggtttatgacattgctggagccgtggctggataaactgcctggtgcggttcttcattgctttaccggcacacgcgaagagatgcaggcgtgcgtggcgcatggaatttatatcggcattaccggttgggtttgcgatgaacgacgcggactggagctgcgggaacttttgccgttgattccggcggaaaaattactgatcgaaactgatgcgccgtatctgctccctcgcgatctcacgccaaagccaagttcccggcgcaacgagccagcccatctgccccatattttgcaacgtattgcgcactggcgtggagaagatgccgcatggctggctgccaccacggatgctaatgtcaaaacactgtttgggattgcgttttaaagtttgcggaactcggtattcttcacactgtgcttaatctctttattaataagattaagcaatagcatggagcgagcctcaccatcgggttcggtgaaaatggcctgaaagccttcgaacgcgccttcggtaataatcaccttatcacccggataaggggttgccggatcgacaatgtctttcggtttatatacgcttagctgatgaataaccgcgcttgggactatcgctgggctcgcgccaaagcgcacgaagtggctgacaccgcgggtcgcgttgatagtcgtggtatgaatcacttctgggtcaaattccacaaacaggtagttggggaacaatggctcactgactgcagtacgttttccacgcacgattttttccagggtgatcatcggtgccaggcaattcacagcctgtctttcgaggtgttcctgggcacgttgaagttgcccgcgcttgcagtacagtaaataccaggattgcataatgactcttatccgtttaatcggggcgcaaggatagcaaaagctttacgctaagttaattatattccccggtttgcgttataccgtcagagttcacgctaatttaacaaatttacagcatcgcaaagatgaacgccgtataatgggcgcagattaagaggctacaatggacgccatgaaatataacgatttacgcgacttcttgacgctgcttgaacagcagggtgagctaaaacgtatcacgctcccggtggatccgcatctggaaatcactgaaattgctgaccgcactttgcgtgccggtgggcctgcgctgttgttcgaaaaccctaaaggctacagtatgccggtgctgtgcaacctgttcggtacgccaaagcgcgtggcgatgggcatggggcaggaagatgttagcgcgctgcgtgaagttggtaaattattggcgtttctgaaagagccggagccgccaaaaggtttccgcgacctgtttgataaactgccgcagtttaagcaagtattgaacatgccgacaaagcggctgcgtggtgcgccctgccaacaaaaaatcgtctctggcgatgacgtcgatctcaatcgcattcccattatgacctgctggccggaagatgccgcgccgctgattacctgggggctgacagtgacgcgcggcccacataaagagcggcagaatctgggcatttatcgccagcagctgattggtaaaaacaaactgattatgcgctggctgagccatcgcggcggcgcgctggattatcaggagtggtgtgcggcgcatccgggcgaacgtttcccggtttctgtggcgctgggtgccgatcccgccacgattctcggtgcagtcactcccgttccggatacgcttagtgagtatgcgtttgccggattgctacgtggcaccaagaccgaagtggtgaagtgtatctccaatgatcttgaagtgcccgccagtgcggagattgtgctggaagggtatatcgaacaaggcgaaactgcgccggaagggccgtatggcgaccacaccggttactataatgaagtcgatagtttcccggtatttaccgtgacgcatattacccagcgtgaagatgcgatttaccattccacctataccgggcgtccgccagatgagcccgcggtgctgggtgtcgcactgaacgaagtgtttgtgccgattctgcaaaaacagttcccggaaattgtcgatttttacctgccgccggaaggctgctcttatcgcctggcggtagtgacaatcaaaaaacagtacgccggacacgcgaagcgcgtcatgatgggcgtctggagcttcttacgccagtttatgtacactaaatttgtgatcgtttgcgatgatgacgttaacgcacgcgactggaacgatgtgatttgggcgattaccacccgtatggacccggcgcgggatactgttctggtagaaaatacgcctattgattatctggattttgccagccctgtctccgggctgggtagtaaaatggggctggatgccacgaataaatggccgggggaaacccagcgtgaatggggacgtcccatcaaaaaagatccagatgttgtcgcgcatattgacgccatctgggatgaactggctatttttaacaacggtaaaagcgcctgatgcgcgtttgttttgccctatttatcgatccgacagagaaagcgcatgacaaccttaagctgtaaagtgaccagcgtagaagctatcacggataccgtatatcgtgtccgcatcgtgccagacgcggccttttcttttcgtgctggtcagtatttgatggtagtgatggatgagcgcgacaaacgtccgttcagtatggctagcacgccggatgaaaaagggtttatcgagctgcatattggcgcttctgaaatcaacctttacgcgaaagcagtcatggaccgcatcctcaaagatcatcaaatcgtggtcgacattccccacggagaagcgtggctgcgcgatgatgaagagcgtccgatgattttgattgcgggcggcaccgggttctcttatgcccgcagcattttgctgacagcgttggcgcgtaacccaaaccgtgatatcaccatttactggggcgggcgtgaagagcagcatctgtatgatctctgcgagcttgaggcgcttagcttgaagcatcctggtctgcaagtggtgccggtggttgaacaaccggaagcgggctggcgtgggcgtactggcaccgtgttaacggcggtattgcaggatcacggtacgctggcagagcatgatatctatattgccggacgttttgagatggcgaaaattgcccgcgatctgttttgcagtgagcgtaatgcgcgggaagatcgcctgtttggcgatgcgtttgcatttatctgagatataaaaaaacccgcccctgacaggcgggaagaacggcaactaaactgttattcagtggcatttagatctatgacgtatctggcaaaccatgcccgatgcgacgctgtcgcgtcttatcgtgcctacaaatagtccgaaccgtaggccggataaggcgtttacgccgcatccggcaattggtgcatgatgcctgatgcgacgctgtcgcgtcttatcgtgcctacaaatagtccgaaccgtaggccggataaggcgtttacgccgcatccggcaattggtgcatgatgcctgatgcgacgctggcgcgtcttatcaggcctacattggtgccggatcggtagaccggataaggcgttcacgccgcatccggcaagtggttaaacccgctcaaacaccgtcgcaataccctgacccagaccgatacacatcgtcgccagaccaaactgaacgtctttgcgttccatcagattcagcagcgtggtgctgatacgcgcaccggaacaacccagcggatgacccagcgcgatcgcgccaccgttgaggttgatcttctcgtcaatctgctcaattagtcccagatctttaatacatggcaggatctgcgcggcaaaggcttcgttcatttcaaacacgccgatatcgctggcagaaagccccgcttttttcagcgccagtttgctggccggaaccgggccgtaacccataatgcttgggtcacaaccaacgaccgccatgctacgcacacgagcgcgcggcttaagacctaattcatgggcgcggctttcactcatcaccagcatggcagctgcgccatcggaaagtgcagaagatgtgcccgccgttaccataccgtttactggatcaaacgccggacgcagcgtggcgagggcttccacggtggtttccgggcgaatcacttcgtcgtaattaaactgcttcaggacgccgtcggcatcgtgaccaccggtcgggatgatttcatttttaaatgcggcgctctgcgtggcggcccaggcgcgggcgtgactccgcgcggcaaaggcatcctgcatttcacggctgataccgtgcatacgcgccagcatttctgccgttaagcccatcatgcccgccgctttggcgacattgcggctcaggccggggtgaaaatcgacgccgtgactcatcggcacatggcccatatgctccacgccgccaaccagacatgcctgcgcatcgccagtcatgatcattcgtgctgcgtcatgcagtgcctgcatggaactaccacacaagcgattaacggtaaccgccgggacagagtgtggtacttctgccagcagcgccgcgttacgggcgatattaaaaccctgctccagcgtctgctgcacacaaccccagtaaatatcgtcgagggccgccgcttccagcgccgggttacgcgccagcaggctacgcattaaatgagcggagagatcttctgcacgcacgttacgaaaagcaccgcccttgctacggcccatcggggtgcgaattgcatcgacaatgacaacctgttccattgtgactccttaagccgttttcaggtcgccaaccggacgggctggctcaaccggaggatagtacggttcgttatgacgcgctttattacgcagaccttccggcacttcatacagcgggccgaggtgctgatattgctgtgccatatcgaggtattttgcgctaccgagggtgtccagccagcggaacgcgccgccgtggaacggagggaagcccaggccgtagaccagcgccatatccgcttccgccggagtggcgataatgccttcctccagacagcgcaccacttcgttgaccatcgggatcatcatgcgggcgataatctcttcttcgctgaagtcgcgcttcggctggctcacttctgccagcaggtcttcaacggcggcgtcttcttctttcttcggcttacctttgctgtcttctttataacgccagaaaccgaggccgttcttctgaccaaagcggttggcatcaaacagcgcgtcgatggcatcgcggtaatctttctgcatccgctgcgggaagcctgctgccatgacagcctgagcgtgatgcgcggtatcaatgcccacaacgtccagcagatatgccgggcccatcggccagccaaactgtttttccatcactttgtcgatcttgcggaaatccgcgccgtcgcgcagcagctggctgaaaccggcgaaatacgggaacagcacgcggttaacaaagaagccggggcagtcgttaaccacaatcggcgtcttgcccatcttgctcgcccaggcgacaactttcgcgatggtttcgtcggagcttttctcgccgcgaataatttctaccaacggcattcggtggaccgggttaaagaagtgcatcccgcagaagttttccgggcgttccagcgcgttggccagttcgctgataggaatggtactagtgttagacgccagcacggtatcctggcgtactttttgttcggtttctgccagtacggcttttttcactttcgggttttcaacaaccgcttctaccacaatatccacgcggtcaaatccggcgtagtcgagcgttgggtggattgtggagatcacgccagccagtttcagaccatcgatcttgccgcgctcaagctgcttgttcagcagtttcgcggcttcggtcatgccgagggttaagctcttgtcgttgatatctttcatgacaaccggcacgcctttccacgcagactggtaagcgatgccgccgcccataatgcctgcacccagcaccgcggcctgtttcggggtttcaacgtctttggtgagtttcttcgctttgccttttacatattgatcgttaaggaaaatgccgaccagtgcgcgggcttcgttggtatgcgccagcgggacaaaacttttgttttccaggtttaaggcttcttcacgaccaaaacgggccgcagcttcaatggtttttactgcggtgatgggggccggataatgtttccccgctgtttgtgcgaccatccctttagcgatggtgaagctcatggtggcttcaatcttgctcagttttagtggttccagcttcggctgacgttttgctttccagtcgaggtcgccgttaatggcctggcgtaaaaccgcctttgcgccttcaaccagtttttctgctttgactacgccatccaccagaccgattttcagcgcctgatccgcgccgacatctttaccggcggcaatgatttccagcgcactgtcagcgcccagcatacgtggcatacgtacagaaccgccaaagccaggcatgatgcccagtttggtttccggcagaccgatgcgcagatccggcgtcgccagacgataatcggtcgccagcacgcattcgcagccaccgcccagcgcatagccattgacggcagcaatggtcggcaccggcagatcttccaggcgattaaacacgctattggcaaagtgcagccactgacttaactgttcttcaggaacgaggaacagggacaaaaattcggtgatatcagcaccgacgataaaggctgctttgttgctacgcagcagcagcccttttagatcactttgctgttccagcacgccgatggcctcgccgaggctggcgacggtcgcagtgtcgagtttattaacactacctggggcatcaaataccagttcggcaatgccatcttccagccagtcaaggtacagggtgtcgcctttgtaaagcatgtcagtctcctgaatccgcaaggtgatctggtcgtaccagatgagtcgaagtgtgtattttgtgttaaaaatatgcaaacaaaagattaaagaaatgccgatctgatcacgctcggcagaaatcacgctctggatgaacgatgtgctaagatgcggagacttaaggtcaaaaaaacagaagggtaaaaaatggaaagtctggccagcctctataaaaatcatatagctaccttacaagaacggactcgcgatgcgctggcgcgcttcaagctggatgcgttacttattcactccggcgagctgttcaatgtttttctcgacgatcatccctatccgtttaaagtgaacccgcaattcaaagcgtgggtgccggtaactcaggtgccaaactgctggttgctggtggatggcgtgaacaagccgaaactgtggttctatctgccggttgattactggcacaacgtcgaaccgctgccgacctctttctggactgaagatgtggaagtgatcgcgctgccgaaagccgatggcattggtagcctgctgcctgctgcgcgcggcaatatcggttatatcggtccggtgccggaacgtgcgctgcaactgggtattgaggccagcaacatcaacccgaaaggggttatcgactacctgcattactatcgctccttcaaaactgagtacgaactggcctgtatgcgtgaagcgcagaaaatggcggtcaacggtcaccgcgcggcagaagaagcgttccgttctggcatgagcgagttcgatatcaacattgcctatctgaccgcgaccggtcatcgtgataccgacgtaccttacagcaacattgtggcgcttaacgaacacgctgcggtactgcattacaccaaactggaccatcaggcaccggaagagatgcgcagcttcctgctggatgccggggcagaatataacggctatgcggctgacctgacccgtacctggagcgcaaaaagtgacaacgactacgcgcagctggtgaaggacgttaatgatgaacaactggcgctgatcgccaccatgaaagcaggcgtcagctatgtggattaccacatccagttccatcagcgcatcgccaaactgctgcgtaaacatcaaatcatcaccgatatgagtgaagaagcgatggtcgaaaacgatcttaccgggccgtttatgccgcatggtatcggccatccgctgggcctgcaggtgcatgacgtcgctggttttatgcaggatgatagcggtacgcacctcgcggcaccggcaaaatatccgtacctgcgctgcacccgtattctccagccgggcatggtgttaaccatcgaaccgggtatctacttcatcgaaagcctactggcaccgtggcgtgaagggcagttcagcaagcacttcaactggcagaaaattgaagcactgaaaccgttcggcggcattcgtatcgaagacaacgtggtgatccacgaaaacaacgtggaaaacatgacccgggatctgaaactggcgtgatggaaagctggttaattcctgcggcaccggtcacggtcgttgaagagatcaaaaagagccgcttcataacgatgttggcgcataccgatggcgttgaggcggcgaaagcgtttgttgaaagcgtgcgggcagaacaccccgatgcccggcaccattgcgtggcgtgggtcgcgggtgcgccggatgattctcaacagctgggtttctctgacgacggggagccggcgggaacggcaggtaaaccgatgctcgcccagctaatgggcagcggcgtcggggaaattaccgctgtggtagtgcgctactacggcggcatattgcttggcaccggtgggttagtgaaagcgtatggcggcggcgtgaatcaggcgctgcgccagctaacgacccaacgcaagacgccattaaccgaatatactttgcaatgtgaatatcatcagttaaccggcattgaagcgttgctggggcagtgtgacggcaaaattatcaacagtgattatcaggcattcgttctgctgcgggtggcgcttccggcggcgaaagtggctgaattttccgcaaagctggcggattttagccgtggtagtttgcaattgttagcgattgaagaataatccccacttcgttttgcagaactaaggaagcggcagagatgcattttcgcgccattacccgaatcgttggactactggtcatcttatttagtgggaccatgattatccctgggctggtagcactcatctaccgggatggagcgggccgcgcttttacccagaccttttttgtcgccctcgccattggctctatgctgtggtggccgaaccgcaaagagaaaggcgaacttaaatcccgtgaggggtttctgatagtggtgctgttctggaccgtgctgggtagcgtcggtgcgctcccttttatcttcagcgaaagcccgaacctcacgattaccgatgcgttttttgaatctttctctggcctgaccactacgggagccactacgctggtggggctggatagcctccctcacgccatcctcttttatcgccagatgctgcaatggtttggcgggatggggatcatcgtgttggcggttgcgatactgcctatcctcggcgtgggtgggatgcagctctatcgcgcagaaatgcccggcccgctgaaagataacaaaatgcgcccgcgaattgcggaaacggcgaaaaccctgtggttgatttatgtcttgctgaccgtcgcctgtgcgctggcgttgtggtttgccggaatggatgcctttgatgccatcggccatagctttgcgactatcgctattggcggcttcagcacacatgatgccagtatcggttatttcgatagcccgactattaacactatcattgctatcttcctgctgatctccggctgtaactacggtctgcactttagtctgttaagtgggcgtagtctgaaggtttattggcgcgatccggaatttcgcatgtttatcggcgtacagtttacgctggtggttatttgtaccctcgtactgtggtttcataatgtctacagtagcgcgctgatgacaattaaccaggcgtttttccaggtggtgagcatggcgacaaccgccgggtttacaactgacagcattgcccgctggccgctctttttgccggtactgcttttatgtagtgcctttatcggcggttgcgccgggagtacgggcggtggcctgaaggtgatccgcatcctgctgctgtttaagcaggggaaccgtgagctgaaacgactggtgcatccgaacgccgtctatagcattaagctggggaatcgcgcactgccggaacgtatcctcgaagccgtttggggatttttctccgcctatgcattggtgtttattgtcagtatgctggcgattatcgccacgggcgtggatgacttttctgcctttgcgagcgttgttgcgacattgaataacctggggccagggcttggcgtggttgctgataactttaccagtatgaacccggtggctaaatggatcctgattgccaacatgctgtttggtcgtctcgaggtctttacattgctggtgctctttaccccgactttctggcgtgaatgatggagtaatacgtgaaaacattaattcttttcagtacaagggacggacaaacgcgcgagattgcctcctacctggctagcgaactgaaagaactggggatccaggcggatgtcgccaatgtgcaccgcattgaagaaccacagtgggaaaactatgaccgtgtggtcattggtgcttctattcgctatggtcactaccatagtgcgttccaggaatttgtcaaaaaacatgcgacgcggctgaatagcatgccgagcgccttttactccgtgaatctggtggcgcgcaaaccggagaagcgtactccacagaccaacagctacgcgcgcaagtttctgatgaacagccaatggcgtcccgatcgctgcgcggtcattgccggggcgctgcgttacccacgttatcgctggtacgaccgttttatgatcaagctgattatgaagatgagtggcggtgaaacggatacgcgcaaagaagttgtctataccgattgggagcaggtggcgaatttcgcccgagaaatcgcccatttaaccgacaaaccgacgctgaaataagcataaagaataaaaaatgcgcggtcagaaaattattttaaatttcctcttgtcaggccggaataactccctataatgcgccaccactgacacggaacaacggcaaacacgccgccgggtcagcggggttctcctgagaactccggcagagaaagcaaaaataaatgcttgactctgtagcgggaaggcgtattatgcacaccccgcgccgctgagaaaaagcgaagcggcactgctctttaacaatttatcagacaatctgtgtgggcactcgaagatacggattcttaacgtcgcaagacgaaaaatgaataccaagtctcaagagtgaacacgtaattcattacgaagtttaattctttgagcgtcaaacttttaaattgaagagtttgatcatggctcagattgaacgctggcggcaggcctaacacatgcaagtcgaacggtaacaggaagaagcttgcttctttgctgacgagtggcggacgggtgagtaatgtctgggaaactgcctgatggagggggataactactggaaacggtagctaataccgcataacgtcgcaagaccaaagaggggtaccttcgggcctcttgccatcggatgtgcccagatgggattagctagtaggtggggtaacggctcacctaggcgacgatccctagctggtctgagaggatgaccagccacactggaactgagacacggtccagactcctacgggaggcagcagtggggaatattgcacaatgggcgcaagcctgatgcagccatgccgcgtgtatgaagaaggccttcgggttgtaaagtactttcagcggggaggaagggagtaaagttaatacctttgctcattgacgttacccgcagaagaagcaccggctaactccgtgccagcagccgcggtaatacggagggtgcaagcgttaatcggaattactgggcgtaaagcgcacgcaggcggtttgttaagtcagatgtgaaatccccgggctcaacctgggaactgcatctgatactggcaagcttgagtctcgtagaggggggtagaattccaggtgtagcggtgaaatgcgtagagatctggaggaataccggtggcgaaggcggccccctggacgaagactgacgctcaggtgcgaaagcgtggggagcaaacaggattagataccctggtagtccacgccgtaaacgatgtcgacttggaggttgtgcccttgaggcgtggcttccggagctaacgcgttaagtcgaccgcctggggagtacggccgcaaggttaaaactcaaatgaattgacgggggcccgcacaagcggtggagcatgtggtttaattcgatgcaacgcgaagaaccttacctggtcttgacatccacggaagttttcagagatgagaatgtgccttcgggaaccgtgagacaggtgctgcatggctgtcgtcagctcgtgttgtgaaatgttgggttaagtcccgcaacgagcgcaacccttatcctttgttgccagcggtccggccgggaactcaaaggagactgccagtgataaactggaggaaggtggggatgacgtcaagtcatcatggcccttacgaccagggctacacacgtgctacaatggcgcatacaaagagaagcgacctcgcgagagcaagcggacctcataaagtgcgtcgtagtccggattggagtctgcaactcgactccatgaagtcggaatcgctagtaatcgtggatcagaatgccacggtgaatacgttcccgggccttgtacacaccgcccgtcacaccatgggagtgggttgcaaaagaagtaggtagcttaaccttcgggagggcgcttaccactttgtgattcatgactggggtgaagtcgtaacaaggtaaccgtaggggaacctgcggttggatcacctccttaccttaaagaagcgttctttgaagtgctcacacagattgtctgatgaaaatgagcagtaaaacctctacaggcttgtagctcaggtggttagagcgcacccctgataagggtgaggtcggtggttcaagtccactcaggcctaccaaatttgcacggcaaatttgaagaggttttaactacatgttatggggctatagctcagctgggagagcgcctgctttgcacgcaggaggtctgcggttcgatcccgcatagctccaccatctctgtagtgattaaataaaaaatacttcagagtgtacctgcaaaggttcactgcgaagttttgctctttaaaaatctggatcaagctgaaaattgaaacactgaacaacgaaagttgttcgtgagtctctcaaattttcgcaacacgatgatgaatcgaaagaaacatcttcgggttgtgaggttaagcgactaagcgtacacggtggatgccctggcagtcagaggcgatgaaggacgtgctaatctgcgataagcgtcggtaaggtgatatgaaccgttataaccggcgatttccgaatggggaaacccagtgtgtttcgacacactatcattaactgaatccataggttaatgaggcgaaccgggggaactgaaacatctaagtaccccgaggaaaagaaatcaaccgagattcccccagtagcggcgagcgaacggggagcagcccagagcctgaatcagtgtgtgtgttagtggaagcgtctggaaaggcgtgcgatacagggtgacagccccgtacacaaaaatgcacatgctgtgagctcgatgagtagggcgggacacgtggtatcctgtctgaatatggggggaccatcctccaaggctaaatactcctgactgaccgatagtgaaccagtaccgtgagggaaaggcgaaaagaaccccggcgaggggagtgaaaaagaacctgaaaccgtgtacgtacaagcagtgggagcacgcttaggcgtgtgactgcgtaccttttgtataatgggtcagcgacttatattctgtagcaaggttaaccgaataggggagccgaagggaaaccgagtcttaactgggcgttaagttgcagggtatagacccgaaacccggtgatctagccatgggcaggttgaaggttgggtaacactaactggaggaccgaaccgactaatgttgaaaaattagcggatgacttgtggctgggggtgaaaggccaatcaaaccgggagatagctggttctccccgaaagctatttaggtagcgcctcgtgaattcatctccgggggtagagcactgtttcggcaagggggtcatcccgacttaccaacccgatgcaaactgcgaataccggagaatgttatcacgggagacacacggcgggtgctaacgtccgtcgtgaagagggaaacaacccagaccgccagctaaggtcccaaagtcatggttaagtgggaaacgatgtgggaaggcccagacagccaggatgttggcttagaagcagccatcatttaaagaaagcgtaatagctcactggtcgagtcggcctgcgcggaagatgtaacggggctaaaccatgcaccgaagctgcggcagcgacactatgtgttgttgggtaggggagcgttctgtaagcctgtgaaggtgtgctgtgaggcatgctggaggtatcagaagtgcgaatgctgacataagtaacgataaagcgggtgaaaagcccgctcgccggaagaccaagggttcctgtccaacgttaatcggggcagggtgagtcgacccctaaggcgaggccgaaaggcgtagtcgatgggaaacaggttaatattcctgtacttggtgttactgcgaaggggggacggagaaggctatgttggccgggcgacggttgtcccggtttaagcgtgtaggctggttttccaggcaaatccggaaaatcaaggctgaggcgtgatgacgaggcactacggtgctgaagcaacaaatgccctgcttccaggaaaagcctctaagcatcaggtaacatcaaatcgtaccccaaaccgacacaggtggtcaggtagagaataccaaggcgcttgagagaactcgggtgaaggaactaggcaaaatggtgccgtaacttcgggagaaggcacgctgatatgtaggtgaagcgacttgctcgtggagctgaaatcagtcgaagataccagctggctgcaactgtttattaaaaacacagcactgtgcaaacacgaaagtggacgtatacggtgtgacgcctgcccggtgccggaaggttaattgatggggttagccgcaaggcgaagctcttgatcgaagccccggtaaacggcggccgtaactataacggtcctaaggtagcgaaattccttgtcgggtaagttccgacctgcacgaatggcgtaatgatggccaggctgtctccacccgagactcagtgaaattgaactcgctgtgaagatgcagtgtacccgcggcaagacggaaagaccccgtgaacctttactatagcttgacactgaacattgagccttgatgtgtaggataggtgggaggctttgaagtgtggacgccagtctgcatggagccgaccttgaaataccaccctttaatgtttgatgttctaacgttgacccgtaatccgggttgcggacagtgtctggtgggtagtttgactggggcggtctcctcctaaagagtaacggaggagcacgaaggttggctaatcctggtcggacatcaggaggttagtgcaatggcataagccagcttgactgcgagcgtgacggcgcgagcaggtgcgaaagcaggtcatagtgatccggtggttctgaatggaagggccatcgctcaacggataaaaggtactccggggataacaggctgataccgcccaagagttcatatcgacggcggtgtttggcacctcgatgtcggctcatcacatcctggggctgaagtaggtcccaagggtatggctgttcgccatttaaagtggtacgcgagctgggtttagaacgtcgtgagacagttcggtccctatctgccgtgggcgctggagaactgaggggggctgctcctagtacgagaggaccggagtggacgcatcactggtgttcgggttgtcatgccaatggcactgcccggtagctaaatgcggaagagataagtgctgaaagcatctaagcacgaaacttgccccgagatgagttctccctgactccttgagagtcctgaaggaacgttgaagacgacgacgttgataggccgggtgtgtaagcgcagcgatgcgttgagctaaccggtactaatgaaccgtgaggcttaaccttacaacgccgaaggtgttttggcggattgagagaagattttcagcctgatacagattaaatcagaacgcagaagcggtctgataaaacagaatttgcctggcggcagtagcgcggtggtcccacctgaccccatgccgaactcagaagtgaaacgccgtagcgccgatggtagtgtggggtctccccatgcgagagtagggaactgccaggcatcaaataaaacgaaaggctcagtcggaagactgggcctttcgttttatctgttgtttgtcggtgaacgctctcctgagtaggacaaatccgccgggagcggatttgaacgttgcgaagcaacggcccggagggtggcgggcaggacgcccgccataaactgccaggcatcaaattaagcagaaggccatcctgacggatggcctttttgcattggcgcagaaaaaaatgccggatgcgacgctggcgcgtcttatccagcctactcttgcttatccgttctgcttttgcatccactccaccacaaaatcagccagcccctcaacatcattaatatccagtaatgcgacatcaagattaagcggcacatcactggctacagcaataacatgcctgtctatcactaattcttcaggtcgatgtccggctccatcgcgaaacagcacaatctttgcgatctcttcatgcttaaacccttcgaccagaatcaaatccagcttactggtatccattcgacttgcgagaaactgtagatccagctcttcttcgtctggtgtttccgtcatcaaggcccatcgttgctggctggcaacgatggtttgtaccgcgccagccttgcgcagctcatagctatctttgcctggcttatcaacatccatatcatggtgcgtatgcttaatcagccctggacggatccctctggcgcataatgccgggatcagttttttcaaaagcgtagtttttccggtaccactccacgcggcaaaggcgagtaacggtatcatcgtttttcctgccatcgggcaagctcctctggcgtattcacgttaacaaatgcatctttatgatcgctgaaatcaaccgcatgaccgccagccagacgcataaataccattacccggcgttctcctgcttgcagatattccagtaataaaggctcaatagcgcggtttaccagagcaatagtcgggtgatcgcgttcaccgtcatggacccacacgacaggcgcatctttgcgctgatgattaagcctggctgctaaatcagggggaatgtaaggcgtatcgcacgggcaaaacaaaaaccactcaccagcttcctgctgcattacactaagcattcctgccagagggcctgggtaatccgccagactatcttcaatcactttcagaccgcttgcctgatagatttcctgatgacgattagcattaaccacgacgtgagagagctgcgtcataagcgcgtcagcgacatgttgccataatggtttgccgtttaattcaagcaatcctttatctacgccgcccattcgtctggctttaccgcctgccagcacaacgcctgttatcgtcgtcatcagattcaccgatatcgcctcttttattgtgggattgaccctgctaacgtgtctgtctcaagagtaaggagcatcactatgaaatgtaaacgtctgaatgaagttattgaactcctccagccagcctggcaaaaagagccagaccttaacctgctgcaatttttgcagaaactggcgaaagagagtggttttgacggcgaactggcggatttgacggatgacattctgatctatcacctgaaaatgcgtgattccgcgaaagatgcggtgatcccgggtttgcagaaagattatgaagaagacttcaaaacggcgctgttacgcgctcgcggcgtaattaaagagtaaaagcttgtaagcggcgccaccaaaatcatcgtgaaatgatatccttcgtcattcgtaatgttttccggatgatgggatgaataacagcgcttttactttccagacactacacccggataccatcatggacgctctgtttgagcatgggatccgggtggattccggtcttaccccgcttaacagctatgaaaaccgtgtctatcaatttcaggacgaagatcgtcgacgttttgtcgtcaaattttatcgccctgaacgttggacagccgatcaaatcctcgaagaacatcaatttgcgttgcagctggtaaatgatgaagttccggtcgcagcacctgtggcctttaacggtcagactttattgaatcatcagggattttatttcgctgtttttccaagcgtcggtggtcgccagttcgaagctgataatatcgatcagatggaagcggttgggcgttatttagggcgtatgcaccagacggggcgcaaacagctttttatccatcgcccgaccatcggtttgaacgaatatctcattgagccacgcaagctgtttgaggacgctacactgataccttccgggttgaaagcggcattcctgaaagcgacagatgagctgattgccgccgttacagcacactggcgggaagatttcaccgttctgcggctacatggagactgccacgccgggaatattctctggcgcgatggtccaatgtttgttgatctggatgatgcacgtaatggtccagccgttcaggatttgtggatgttgctcaatggcgataaagccgagcagcggatgcaactggaaactattattgaagcttatgaagaatttagcgagttcgacaccgctgaaatcggactgattgaacctttacgcgccatgcgtttggtttattatcttgcctggctaatgcggcgttgggctgatcccgcgttcccgaaaaatttcccgtggttaaccggggaagattactggctgcgacagacggcgacttttatagaacaggcaaaagttctacaagaaccccctttgcaattaacacctatgtattaatcggagagagtagatcatgaaaaagatttggctggcgctggctggtttagttttagcgtttagcgcaagcgcggcgcagtatgaagatggtaaacagtacactaccctggaaaaaccggtagctggcgcgccgcaagtgctggagtttttctctttcttctgcccgcactgctatcagtttgaagaagttctgcatatttctgataatgtgaagaaaaaactgccggaaggcgtgaagatgactaaataccacgtcaacttcatgggtggtgacctgggcaaagatctgactcaggcatgggctgtggcgatggcgctgggcgtggaagacaaagtgactgttccgctgtttgaaggcgtacagaaaacccagaccattcgttctgcttctgatatccgcgatgtatttatcaacgcaggtattaaaggtgaagagtacgacgcggcgtggaacagcttcgtggtgaaatctctggtcgctcagcaggaaaaagctgcagctgacgtgcaattgcgtggcgttccggcgatgtttgttaacggtaaatatcagctgaatccgcagggtatggataccagcaatatggatgtttttgttcagcagtatgctgatacagtgaaatatctgtccgagaaaaaataattcaatgtaaattacataaagcccgtgaatattcacgggctttttttattatttaataaatataaatacattctgataatgcatcctgccgctggacattatttcagcataagtggatattcaaagttttgctgttttatcagggaatatttatatgatacgtaagagtgctacaggtgttattgttgcgttagccgtaatctggggtggtggcacatggtacacaggtacgcaaattcagcctggtgtcgaaaaatttattaaagattttaacgatgctaaaaagaaaggtgaacatgcctacgatatgacgttaagttatcaaaattttgacaaaggcttttttaattcccgttttcaaatgcaaatgacattcgataacggtgcacccgatctcaatatcaagccaggccagaaagttgtatttgatgtggatgttgagcacggtccgttgcccatcacaatgttaatgcatggtaatgtcatcccagcactggcagcggcaaaagtgaacttagtgaataatgaactgacacaaccgctatttatcgccgcgaaaaataaaagccccgtggaagcgacattgcgattcgcgtttggtggcagtttctctacgacattagatgttgcccctgcagagtatggaaagttttcttttggtgagggccagtttacttttaatggtgatggtagtagtttgtctaacctggatattgaaggcaaagtcgaagatattgttctgcaattaagtccaatgaacaaagtaacggcaaaaagttttaccattgattctctggcgcgattagaagaaaagaaatttccggttggtgaaagcgagagcaaatttaatcagattaacattatcaatcacggggaagacgttgcccaaatcgatgctttcgttgcaaaaaccaggctggatcgcgttaaagacaaagattatatcaatgtcaatctcacctacgaacttgataagttaacaaaagggaatcagcaactcggtagtggtgagtggagtttgattgctgaatctattgatcccagtgcagtgcgccaatttatcatccagtataacattgcgatgcagaagcagcttgctgcacaccctgagttagcaaacgatgaagttgctctgcaagaagtgaatgctgcattgttcaaagagtatttaccgttattacaaaaaagtgagccgaccattaaacaaccggtaagatggaagaacgcactcggcgaactaaatgccaatctggatatcagtattgccgacccagccaaatctagtagttccacaaacaaagatatcaaaagcctcaattttgatgtgaagttaccgcttaatgtcgtcacagaaaccgcaaaacagcttaatttatctgaaggaatggatgcggaaaaagcgcaaaagcaggctgataaacaaatcagcgggatgatgacattaggtcagatgtttcagttaatcacgattgacaacaataccgccagcctgcagctgcgttatacaccgggtaaagttgtttttaacggacaggagatgagcgaagaagaatttatgtctcgtgccggacgttttgttcattaaaatactcactcgcctctgctcattcagaggcgagtaaaacttacttattctgacgctgactactcatgagagacgtcagaagccggtctttttcctgccacaaactgttcagccattgctgaaaatggcgcttaaagcttttgtcattgatgtagtcgccatgtaactcatcggcaataggctgtaaatccacatgtacgacaatccgcgtcagtttaccgcttaacatatcgaagaacggctgacggttattgtccggataacacagcgtaacattaagcagtttatcgaattgtttacccagtacatttagcgccatcgcaatgcctgccgcctttggtggcaacaagttttgaaaagtggagtgggtttgctgatgtttttcttgcgtgaaacgggagccttcaacgaaattgacaatggtggtgggatgcaggcgaaacttttcacaagaacgccgagtggtttcaacatctttaccacgtcgctccggatgacgtaataaataagcgcgggaataacgcttcataaacggcatatccaggctccagcacgccaggccaagaaatggcacccaggccagctgttgcttgaggaaatatttattcatcggaatgtgcttacgaaacagcacgcacagtacgacaatatctgcccaactacggtggttacaaataagcagataccagttcttcttacttaacccttccagcccgtgaacttcccattgaaggtgtgggttcagatgcagtaataccgccagaccttcacaccagcaatacatcataaaatcacaaaaacggctaacctttcgccaaatgactggcacaggtagcaatagttttacaatcccggcaatgatgatcgggacggaacaaaaaatagtgaccaaaatggtcaatacgatactcagcaaaagggttatcgcagcgagtattctcgtcataatgaatttattcaaaaggttagccatagacagtgcgctaaagaagcgcaaggcgcagattttagcagaaaacgacccaaataacggatgatccttaaggagaaaaataattcatatctatccacattagaaaaaatcccattatctcaattattagggatggatttatttttaactgcatgaaaaacaaagacaaacatcatgctgtaaaaagcatgataataaattaaaagcgatgtaaataatttatgcacaaagttatccacatgacgatttgcgagcgatccagaagatctacaaaagattttcacgaaaagcggtgaaaaactcatgttttcatcctgtctgtggcatcctttacccataatctgataaacaggcacggacattatggttcagatcccccaaaatccacttatccttgtagatggtagttcttatctttatcgcgcatatcacgcgtttcccccgctgactaacagcgcaggcgagccgaccggtgcgatgtatggtgtcctcaacatgctgcgcagtctgatcatgcaatataaaccgacgcatgcagcggtggtctttgacgccaagggaaaaacctttcgtgatgaactgtttgaacattacaaaagtcatcgcccgccaatgccggacgatctgcgtgcacaaatcgaacccttgcacgcgatggttaaagcgatgggactgccgctgctggcggtttctggcgtagaagcggacgacgttatcggtactctggcgcgcgaagccgaaaaagccgggcgtccggtgctgatcagcactggcgataaagatatggcgcagctggtgacgccaaatattacgcttatcaataccatgacgaataccatcctcggaccggaagaggtggtgaataagtacggcgtgccgccagaactgatcatcgatttcctggcgctgatgggtgactcctctgataacattcctggcgtaccgggcgtcggtgaaaaaaccgcgcaggcattgctgcaaggtcttggcggactggatacgctgtatgccgagccagaaaaaattgctgggttgagcttccgtggcgcgaaaacaatggcagcgaagctcgagcaaaacaaagaagttgcttatctcagttaccagctggcgacgattaaaaccgacgttgaactggagctgacctgtgaacaactggaagtgcagcaaccggcagcggaagagttgttggggctgttcaaaaagtatgagttcaaacgctggactgctgatgtcgaagcgggcaaatggttacaggccaaaggggcaaaaccagccgcgaagccacaggaaaccagtgttgcagacgaagcaccagaagtgacggcaacggtgatttcttatgacaactacgtcaccatccttgatgaagaaacactgaaagcgtggattgcgaagctggaaaaagcgccggtatttgcatttgataccgaaaccgacagccttgataacatctctgctaacctggtcgggctttcttttgctatcgagccaggcgtagcggcatatattccggttgctcatgattatcttgatgcgcccgatcaaatctctcgcgagcgtgcactcgagttgctaaaaccgctgctggaagatgaaaaggcgctgaaggtcgggcaaaacctgaaatacgatcgcggtattctggcgaactacggcattgaactgcgtgggattgcgtttgataccatgctggagtcctacattctcaatagcgttgccgggcgtcacgatatggacagcctcgcggaacgttggttgaagcacaaaaccatcacttttgaagagattgctggtaaaggcaaaaatcaactgacctttaaccagattgccctcgaagaagccggacgttacgccgccgaagatgcagatgtcaccttgcagttgcatctgaaaatgtggccggatctgcaaaaacacaaagggccgttgaacgtcttcgagaatatcgaaatgccgctggtgccggtgcttagtcgcattgaacgtaacggtgtgaagatcgatccgaaagtgctgcacaatcattctgaagagctcacccttcgtctggctgagctggaaaagaaagcgcatgaaattgcaggtgaggaatttaacctttcttccaccaagcagttacaaaccattctctttgaaaaacagggcattaaaccgctgaagaaaacgccgggtggcgcgccgagtacgagcgaagaggtactggaagaactggcgctggactatccgttgccaaaagtgattctggagtatcgtggtctggcgaagctgaaaagcacctacaccgacaagctgccgctgatgatcaacccgaaaaccgggcgtgtgcatacctcttatcaccaggcagtaactgcaacgggacgtttaagcagtaccgatcctaacctgcaaaacattccggtgcgtaacgaagaaggtcgtcgtatccgccaggcgtttattgcgccagaggattatgtgattgtcagtgcggactacagccagattgaactgcgcattatggcgcatcttagccgtgacaaaggcttgctgaccgcattcgcggaaggaaaagatatccaccgggcaacggcggcagaagtgtttggtttgccactggaaaccgtcaccagcgagcaacgccgtagcgcgaaagcgatcaactttggtctgatttatggcatgagtgctttcggtctggcgcggcaattgaacattccacgtaaagaagcgcagaagtacatggacctttacttcgaacgctaccctggcgtgctggagtatatggaacgcacccgtgctcaggcgaaagagcagggctacgttgaaacgctggacggacgccgtctgtatctgccggatatcaaatccagcaatggtgctcgtcgtgcagcggctgaacgtgcagccattaacgcgccaatgcagggaaccgccgccgacattatcaaacgggcgatgattgccgttgatgcgtggttacaggctgagcaaccgcgtgtacgtatgatcatgcaggtacacgatgaactggtatttgaagttcataaagatgatgttgatgccgtcgcgaagcagattcatcaactgatggaaaactgtacccgtctggatgtgccgttgctggtggaagtggggagtggcgaaaactgggatcaggcgcactaagattcgcctgaacatgccttttttcgtaagtaagcaacataagctgtcacgttttgtgatggctattagaaattcctatgcaacaactgaaaaaaaattacaaaaagtgctttctgaactgaacaaaaaagagtaaagttagtcgcgtagggtacagaggtaagatgttctatctttcagaccttttacttcacgtaatcggatttggctgaatattttagccgccccagtcagtaatgactggggcgttttttattgggcgaaagaaaagatccgtaatgcctgatgcgctatgtttatcaggccaacggtagaattgtaatctattgaatttacgggccggatacgccacatccggcacaagcattaaggcaagaaaattattcgccgtcctgcgtttcttctacaggctgcatctcgctaaaccaggtatccagtttctgccgcagcttgtccacgccttgtttcttcaagctagaaaacgtttcaacctgcacatcaccgttaaacgccagtacagcttcacgcaccatattcaattgcgctttacgtgcgccgcttgccagtttgtccgctttggtcagcagcaccagaacggcgatattgctgtctaccgcccactcaatcatctgctgatccaaatctttcagcggatggcgaatatccattagcaccaccagaccttgcaggctctgacgtttttcgaggtattcgccgagcgcacgctgccatttgcgcttcatctcttccgggacttccgcataaccgtacccaggcaagtcaaccagacgcttgccgtcagccacttcaaacaggttgataagctgggtgcgccctggggttttactggtacgagccaggcttttctggttagtcagcgtgttcagcgcgctggatttacctgcgttggaacggcctgcaaaagccacttcaattccggtatcggaaggtaggtggcgaatatcaggcgcactcatcacaaaatgcgtctgttgataattcaaattagtcaaagcggtcgtctccgtcagtcaaagctttgtggcgattatacctgaaccataataaaaggcggatttttcggcgtgagcgttgtaagtaaaagccatacgctttgtgagacattgccgatagtctttatgcgaaatagcagagaaaattctgcgatgcatgtcaaataagctatataaatcagtgaattgcttttatataaaactctgaaaatgtgcaaatactgatggcggttgattgtttgtttaaagcaaaggcgtaaagtagcacccatagagcgaggacgctaacaggaacaatgactcaggatgagggtcaggagcgccaggaggcgaagacagaggattgtcaggaagacaaacgtccggagacgtaattaaacggaaatggaatcaacacggattgttccggctaaaggaaaaacagggtgtgttggcggcctgcaaggattgtaagacccgttaagggttatgagtcaggaaaaaaggcgacagagtaatctgtcgccttttttctttgcttgctttctgttagattccgccgcaaatctatactgaataaaacggctaaaagacgaaccattatgaaaccaagttctagtaacagtcgcagcaaaggtcatgcaaaagcgcgtcgaaaaacacgcgaggagctggatcaggaagctcgtgatcgcaagcgtcagaaaaaacgtcgtggtcatgcgccgggcagccgcgcagcgggcggaaacaccacgagtggcagcaaaggccagaacgcaccaaaagatccacgtattggcagtaaaacccctattccattgggcgtgactgaaaaagtcaccaaacagcacaaaccgaagagtgagaaacctatgcttagtccgcaggcggagttggaattactggaaacggatgagcgtctggatgcgctgctggaacgtctggaagcaggcgaaaccctgagtgccgaagagcaatcctgggtggatgctaaactggatcgtattgatgagttgatgcagaaactcggcctctcttatgacgatgacgaagaagaggaagaagacgagaagcaagaagacatgatgcgtctgctgcggggcaactaacggattgccgccgtgggccttcccgttctgctgataacccttccggttatatgttatctggtgtggttattcgttaaactacagcggttgtcgcggcgacaaaagtggctgcgcaaccggctgatgacccgaaacgggcatccgccggtacgccgtagccgccagagacgccatcggaaggagtgagcatgtctgtacagcaaatcgactgggatctggccctgatccagaaatataactattccgggccacgatacaccagctacccgaccgcgctggagtttagtgaagacttcggcgaacaggcgtttttacaagccgtggcgcgctatcctgagcgtccattatctctctacgtacatatcccgttctgccataagctttgttacttctgcggttgcaataagattgttactcgccagcagcacaaggccgatcagtatctggacgcgctggagcaagaaatcgtccatcgtgcaccgctgttcgccgggcgtcacgtcagccaattgcactggggcggcggaacgccgacgtatctgaataaagcgcaaatcagccgcctgatgaagctgctgcgcgaaaacttccagttcaatgccgatgcggagattagcatcgaagtcgatccgcgggaaatcgaactggatgtactcgatcatttacgcgccgaaggctttaatcgcctgagcatgggcgtgcaggacttcaacaaagaagtgcaacgtctggttaaccgcgagcaggatgaagagttcatctttgcactgcttaaccatgcgcgtgagattggttttacctccaccaacatcgacctgatttacggcctgccgaaacagacgccggagagtttcgcctttaccctgaaacgtgtggcggagctgaaccccgatcgtctgagtgtctttaactacgcgcatctgccgaccatttttgctgctcagcgcaaaatcaaagatgctgacctgccgagtccgcagcaaaaactcgatatcctgcaggaaaccatcgccttcctgacgcaaagcggctatcagtttatcggtatggatcactttgcccgtccggatgacgagctggcggtggcccagcgtgaaggcgtgctgcatcgtaacttccagggctacaccactcagggcgataccgatctgctggggatgggcgtttccgccatcagcatgattggcgactgctacgcgcagaaccagaaagagttgaagcagtactatcagcaagtggatgaacaaggcaatgcgctgtggcgtggtattgcgctaacgcgtgatgactgtattcgccgcgatgtgattaagagcctcatctgcaacttccgtctggattacgcccctattgagaaacagtgggatttgcacttcgctgattactttgcggaagatctcaagctgctcgccccgttagcaaaagatgggctggtggatgtggatgagaagggaatacaggtgacggcgaaaggtcgcttgctgatccgcaacatttgcatgtgctttgatacctatctgcgccagaaagcgcggatgcagcagttctctcgggtgatttaaatagtgaatggcgcttcgtttacaaagtagaaaacgaaagcgccatcaatgtgctgagaacaagattgcctgatgcgctgggcaacaaaacctgttgaaattattgcttttgtaggccggataaggcgtttacgccgcatcaggcatctgagcatgatgcctgatgcggcgctggtcgcgtcttatcaggcctacgactttctccgcatccggcataaacaacgagcttcagctaaacagcccaatcattgcggcacacagcacggcagcaacggcagtttgcggtgtgtggctgtcaactgcgccactcgataccagattaattattgattccagcataatgactctccccgttttccgggcaagatcatactgaacttatcggaacagtaaagcgtaaaataccagcaatttgcgctcaataatcaatctttacacacaagctgtgaatcactccatccccagctcttttaacttacgcgtcagggtgttgcggccccagccgagtagccgcgccgcttcctgtttatgcccctgcgtatgtcgcaacgcggtcgtcagtaacgtccgctccagctctggctgcgcttcggaaagcagattttgatgaccggaacgcagcgctctgtctgcccactgcgcaagaagcgtcgcccagctgtccggttgcatttggctagtactctccgcaaccgtactttcaaacagttcgccgggcaaatcctgaatcaacacttcctgcccggcggccatcaccgttagccagcggcaggtgttttccagctggcgcacgttgcctggccacgccagacgcgtcagagcagcttcggtttccggatgcagtaacttcgcttctacgcccagttcgcgcgcggcaacctgtaaaaaatggcgcgccagacggggaatatcttcccgacgttcgcgcagcggcggcagatgaacgcggataacgttcaggcggtggaacagatcctcacggaacttaccttcctgcactcgctgttcgagattctggtgagtggcagcgataatccgcacatccactttcaccggcgcatagccgccaacgcggtaaaactgaccgtctgccagcacgcgcagcaaacgcgtctgcacatccagcggcatatcaccaatttcgtcgaggaataatgtaccgccatcggcctgttcaaaacgcccctgacgaatggtattcgcgccagtaaacgcgcctttctcgtggccaaacagttcactttcgatcaaatcttttgggatagctgccatattcagcgcgataaacggcgctttggcgcgcggactgtggcgatgcagggcatgagcgaccagttctttaccggtgccggattcgccgttaatcagcacgctaatagaagaacggctaagccgaccgataatacggaacacgtcctgcatggctggcgcttcgccgatgatatcggtcgttgggccgttaagctgaacattacgcggctgctgctgttcctggtaatgactgatagcgcgctcaaccagcgccactgcttcgtcgatatcaaacggtttgggcagataatcaaacgccccttgttgataggcgctgacggcagcatccagatcggaatgtgcggtcataatgatgaccggaagcattggatggcgctgtttaatctgcttgagcagcgccagcccgtccattcccggcatacggatatcactaagcagcacatccggcgttttgctcgccagcgcctccagcacttctgcgccgttctcaaacgtcgtacaggttaaacctgccccagcgagcgcacgttcaagcacccaacggatggaactatcgtcatcgactacccagactatccctcgttgcataaacgtcacctttatttcctgataggcaggtaaacgctgaactcggtatgccctggccaactggtaaattcaattttgccactatgctgatcaatcaaattacgagcgatggataagccaagcccggtgccaccttcgcggccgctgaccatcgggtaaaacagcgtatcctgcaaatgaggcggaatgcccggcccgttatcttccacatcaatccgcgccgccagccggtagcgctcgccgtgtaaggtcagttgaaacgcggtgcgggtacgcagaatgatttcaccgccttccggccccagcgcctgtagcgcattgcgcacaatattcagcaagacctgttcaatttgatccgggtcgtgcgccagttccggtaggctgggatcgtaatcacgaatcaaccgcacgttgtccggcagttccatgctcaccagcgttaccacgcgttcagccactttgtgaatactttcggtaacgcgcgtaccgggcagctgcggccccaacagacggtcgaccagatttcgcagccggtccgcctgttcgataatcactttggtatattcgagtagacttgggtcaggtaacgctttgctgagcagctgcgccgcgccacgtaaaccgccaagcggatttttaatctcatgtgccaggccgcgcactaaatcacgggcagcaacctgctgggcgtgctgtagctgttcctgacttaagcggcgctggttatccatcggagccatctccagcaggatcatgccgtccggcatacgctgggccgtcacagaaaggatatggctgcgcccgtcgatgaccagcgtcacttcgttatcggtaaaaccttgccccgcctccagactttcttgcatcagctcgatatttaaactgaagtagctcaacagttccggtaacggtgtaccaaacaatttgcgggagctttgggcgagcagttgttgcgcggcagggttggcgtaatggatcgccaggttgtcatcgattaacaaaatactgttaatcaggctgttgaggatctgcccagcatcgggctgcgtgcctgttgccataaagcagtctcctgaacaggttgcaccattttagtgcattatagctttttacggataaaaagcgcgaagcatcagagaattgacggagaaaaaagcccatgcagagatgggctacagatagctgacaaacttcacgttggagagcgactcacctgctccggcctaccacatcatcaccgtgtaggccggataagacgcatttgcgtcgcatccggcgtgatgtgcttgccaccgatcccaggcctgccagagacaggcgaaaagtttccacggcaactaaaacacttagacgctgtagtacagctcaaactctaccggatgcggagtcatacgcacgcggtcatcttcttcgcgacgcagagcgatgtacgcatcaattgcttcgtcagtgaacacgccaccggctttcaggaactcgcggtccagatccagttcgttcagtgcttcttccagagagcctgcaacctgtgggatctctttcgcttcttctggcggcaggtcatacaggtttttgtccatggcttcgcccggatggatcttgttcttgataccatcaagaccggccatcagcagggcagcaaagcacaggtacgggttagctgccggatccgggaaacgtacttcgatacgacgtgctttcggagaagaaaccaccggaatacggatagacgcagaacggttacgcgcagagtaagccagcattaccggtgcttcatagcccgggaccagacgcttataagagttggtggtcgggtttgccagggcgttaatcgctttagcgtgtttgattacgccgccaatgtagtacagcgcctgctcagacagacctgcgtatttgtcgcctgcgaacaggttaacgccgtttttagacagagacatgtggcagtgcataccggagccgttatcaccgaacatcggttttggcataaaggtcgcggttttaccgaagcggtgcgctacgttgtgcacaacatatttgtagatctgaatttcgtcagcttttttggtcatggtattgaagcgggtagccacttcgttctgaccagcagtcgctacttcgtggtgatgggcttcaaccaccagacccatctgttccatcaccagacacatttcagaacgaatatcctgagcgctgtctaccggtggaaccgggaagtaaccgcctttcactgccggacggtgacctttgttaccaccttcgtattgggtggaggagttccatgcgccttcgatatcgtcgatagcaacgtgggaaccggagatagaacttccgaaacggatgtcatcgaacaggaagaattcaggttctggcccgaacagtacggtgtcggcaatgccagtggaacgcaggtaatcttcggcgcgcttcgcaatggagcgcgggtcacggtcatagccttgcagggtgccaggttcaaggatgtcgcaacggataatcagggtggagtcggcgaagaacgggtcaatcactgcggtggatgcgtctggcatcagcaccatgtcggactcgttaatgcctttccagccgccaatgctggagccgtcaaacattttgccttcttcgaagaattcagcattcacctgatgagcagggatagtgacgtgctgttctttacctttagtatcggtgaagcgcaaatcaacaaacttcacttcgtgctcgttcagcatcgtcagtacgtgttcagcggacatactttaactctcctggattggtcatggtcgtcgtggtaacgaaatctgcaattattttggccgtgtcgccgtaaaaaagataaagcgaaatctgtgccaacttttaaattgcccctaaaaggcgttatcatgcgcaccatcgtgcaaaagggctgcaccacgatgtgaatgttgcaccaatatagtgcttcaatggaaacattaagcaccatgttggtgcaatgacctttggataaccctttttatgctccgtgaaagcgatcacaaagggactctgcaatacttgtttgcggaggatgtttgtgatcctgttttgtagtgcgattaatccgtgtacaataacgcgctatttctaatgcctgaggcaaagttgtgatcgaaaaattgcgtaatatcgccatcatcgcgcacgtagaccatggtaaaaccaccctggtagacaagctgctccaacaatccggtacgttcgactctcgtgccgaaacccaagagcgcgtgatggactccaacgatttggagaaagagcgtgggattaccatcctcgcgaaaaacaccgctatcaaatggaatgattaccgtatcaacatcgttgataccccggggcacgccgacttcggtggtgaagttgaacgtgtaatgtccatggtagacagtgtgctgctggtggttgacgcatttgacggcccgatgccgcaaacgcgcttcgtaaccaaaaaagcgtttgcttacggcctgaagccgattgttgttatcaacaaagttgaccgccctggcgcgcgtcctgattgggttgtggatcaggtattcgatctgttcgttaacctcgacgcgaccgacgagcagctggacttcccgatcgtttacgcttctgcgctgaacggtatcgcgggtctggaccacgaagatatggcggaagacatgaccccgctgtaccaggcgattgttgaccacgttcctgcgccggacgttgaccttgacggtccgttccagatgcagatttctcagctcgattacaacagctatgttggcgttatcggcattggccgcatcaagcgcggtaaagtgaagccgaaccagcaggtcactatcatcgatagcgaaggcaaaacccgcaacgcgaaagtcggtaaagtgctgggccacctcggtctggaacgtatcgaaaccgatctggcggaagctggcgatatcgttgcgatcacgggccttggcgaactgaacatttctgacaccgtttgcgacacgcaaaacgttgaagcgctgccggcactctccgttgatgagccgaccgtttctatgttcttctgcgttaacaccagcccgttctgcggtaaagaaggtaagttcgtaacgtctcgtcagatcctggatcgtctgaacaaagaactggtacacaacgttgcgctgcgcgtagaagaaaccgaagacgccgatgcgttccgcgtttctggtcgtggcgaactgcacctgtctgttctgatcgaaaacatgcgtcgtgaaggtttcgaactggcggtatcccgtccgaaagttatcttccgtgaaatcgacggtcgtaaacaagagccgtatgaaaacgtgactctggacgttgaagaacagcatcagggttctgtaatgcaggcgctgggcgaacgtaaaggcgacctgaaaaacatgaatccagacggtaaaggccgcgtacgtctcgactacgtgatcccaagccgtggtctgattggcttccgttctgagttcatgaccatgacttccggtactggtctgctgtactccaccttcagccactacgacgacgtacgtccgggtgaagtgggtcagcgtcagaacggcgtactgatctctaacggtcagggtaaagcggtcgcgttcgcgctgttcggtctgcaggatcgcggtaagctgttcctcggtcacggtgcagaagtttacgaaggtcagattatcggtattcatagccgctctaacgacctgactgtaaactgcctgaccggtaagaaactgaccaacatgcgtgcttccggtactgacgaagccgttgttctggttccgcctatccgcatgactctggaacaagctctggagttcatcgatgatgacgaactggtagaagtgactccgacctctatccgtattcgtaaacgtcacctgacggaaaacgatcgtcgccgcgccaaccgcgcaccgaaagacgattaatttcgttttttagtcataaaaaacctgccagcgatggcaggttttttttgcctgtcgtgagcgcacaccaatgcgagtatctcccttataagtctgtggttacgtcaatagagagctttgtcacaattatctgcaaagtcatacgccgttaattgctttcttttttggcgtaagcgtaagatgcttcatctggtttaaaccaaaaggattaaacaatggcggagaatcaatccaccgtagaaaatgcaaaagagaaactggatcggtggttgaaagatggcatcaccacgccgggtggaaaactccctagtgaaagagagctgggagaactgctgggcattaaacgtatgacgctgcgccaggcgttgttgaacctcgaggcagaatccaaaatcttccgtaaggatcgtaaggggtggttcgtgacccagccgcgatttaattacagtccggagctgagcgcgagctttcagcgggccgcaattgagcaagggcgagagccttcctgggggtttaccgagaaaaaccgtaccagcgatattcccgagacgctcgcgccactgattgcagtgacgccaagtactgaactctatcgcatcaccggctggggggcgctggaaggacataaagttttctatcacgaaacatatattaatcctgaagttgctccgggctttattgaacaacttgaaaaccacagtttttctgcagtctgggaaaagtgctaccaaaaagagacggtagtaaaaaaattgattttcaaacccgtcagaatgccgggcgatatcagcaagtatcttggcggttctgcgggtatgccagcgatcttaattgaaaagcatcgcgccgaccagcaaggcaatattgtccaaatagatattgaatattggcgatttgaggccgtagacctcatcattaatctgtaagtgttttatggtgacaataaataacgcaagaaagattctacaacgtgtcgacactcttcctctttatttacatgcttatgcctttcatttaaatatgcggctggaaagagtgttgcctgctgatttacttgatatcgcaagtgaaaataatctacgtggcgtcaaaatccatgttctcgatggcgagcgtttttctcttggtaatatggacgataaagaactctctgcctttggggataaagcccgccgtctgaaccttgatattcatattgaaaccagcgccagtgataaggcatctattgacgaagccgtcgccatcgcgttgaaaactggggcaagctccgtacgtttttatccacgttatgaaggtaatttgcgcgacgtattaagcattatcgctaacgacattgcctatgtacgggaaacgtatcaggacagcggcctgacttttacgatcgagcagcatgaagatttaaaaagtcatgagctggtgagcctggtcaaagaaagtgagatggaatctctttccttactgtttgattttgcgaacatgatcaatgcaaatgagcatcccatcgacgctttaaaaacgatggcaccgcatattacccaggtccatatcaaagatgccttgatcgttaaagaaccgggtggcctgggtcataaagcctgtattagtggtcagggtgatatgccgttcaaagcgttattaacgcaccttatctgcctgggtgatgatgagccgcaggtgacggcatatggcctggaagaagaggttgattactatgcgccggcgttccgctttgaagacgaagatgataatccgtggatcccttatcgccagatgagtgaaacaccattgccagaaaatcatttactggatgcgcggttacgtaaagaaaaagaagatgcaattaatcagataaatcatgtgcgtaacgtactacaacaaatcaaacaagaggcaaaccatcttctgaaccactaataagttttaactcatacgcagttaataaaaccattccatatgaatggtcggtatcttattgcctttaaaacagtgattttaaaaatcgcttaggggatgttatgctcacgaaaaagaaatgggcgttatttagtctattaacactgtgtggcggtacaatttataaattaccgagcctgaaagatgcgttttatatcccgatgcaggaatatttccatttgaccaatggtcaaattggtaatgctatgagcgtaaacagttttgtcaccacagtgggcttttttctgtctatttattttgccgataaactaccgcgcagatacaccatgagtttcagtctcattgcgacaggattactgggtgtttatttgacgacaatgccggggtattggggcatcctctttgtctgggcgctatttggcgttacttgcgacatgatgaactggccggtcttgctcaagagcgtaagtcgattgggcaatagcgaacaacaaggtcggttgtttggcttcttcgaaacagggcgtggcattgtcgataccgtggtggcattttctgcgttggcagtatttacctggtttggcagtggcttattaggttttaaagcaggcatctggttctattcccttattgtgattgccgtaggcattattattttctttgtcctgaatgacaaagaagaggcaccgtccgttgaggtgaaaaaagaagacggagcaagcaaaaacaccagtatgaccagcgtgctgaaagacaaaactatctggcttatcgcttttaacgtcttcttcgtttacgcggtttactgtggcctgacattcttcattccattcctgaaaaacatctatctattgcccgttgcgctggtgggggcttacggcatcattaaccaatactgtctgaaaatgattggtggaccgattggtggcatgattagtgataagatcctgaaaagcccaagtaaatatctatgctacacctttatcattagtaccgctgcgctcgtactgttgattatgctgccgcacgaaagtatgccggtctatttagggatggcatgtacgctgggctttggcgcgatagtctttacacagcgagccgtattttttgcacctatcggcgaagcaaaaattgctgaaaataaaacaggtgcggcgatggcgttgggtagctttattggttacgctccggcgatgttctgcttcagtctgtatggctacattctggatttaaatccggggattattggctacaaaatcgtgtttggcattatggcctgcttcgcattcagtggtgcggtggtttccgtaatgctggttaagcgtattagccaacgtaagaaagagatgctggcggctgaagcttaattaatggccggatgtgcttaatccggccaacgaaaaccgtatcaaccgtaggccggataaggcgtttacgccgcatccggcagtttcacatcagaagaaatacttcgtcccgatacggatctggttttgctcgcggtggtacggttcgacgttgcggtctaaccagcgcaattcgaaataagggagccagtgttcattaatacggtaacggaaggtgttagtgatttcccaatgatgatctttcccgttgctactattaaagtcattcactcgcatgaagtaatgtggctcaaatgtataggaaaatttatcggtgattttaaaattccagtaggtgccaatttcataggtgtcattattatccagttccccgctcaaatctgtactactatagttattatggttatagcgatttcgtactgtcagattaaaccatggtacaaatttatagttgacgtccagatacactgcaccaccgctaccgatactcttatcattaattaagccaccgggctggatggttaatttatcggttggtttaaataacggataccagccttcaatttcgttatatccatgttttagttcatcttctcgctgaaagttgtaggtattggttaacataatacccgcgcccatatcgaagttataacccacacgtagcataacctcgccctgatcggaggcaagattatatgcctccctgttttcgacgtatgcgccagcaaatacgctggcagaggtcagagaagataataaaattattgcattaatctttttcataataagtccattttttaaacgtagggaggccgccacccaccaggatggaaatagcggctattgacatttataacgttacggaagccgttttttcttctgtcgccatctctttatttttgcgttggttgatttcctcaataatcaatgcaaaccgtttttcattgagtgtgtaaaagaatcccatcgtcaatgcagcaataattgccagtgcacaaggccagataaaaatgagctgacgcaaaccctgtaatgtcgcatcgctttgcgcgatgttgggaacataaccaatttgcgtcagcataatgcctggcaagaagccagcaagtgcggcagaaattttacgaaagaaggtataaccggtataaacagaaccttcggcacgaataccggttttccattcaccgtaatctacggtatctggtaccagtgcccagttcaggctgtttacaaaggccgtgccaaaaaaggcgacacaagagaacatgacgaaagtgaaagagttacttccccagaaataattcagtatatcacccaccgcccacagcaccatgccagccagataaacctgttttttaccaaaacattttacagttaatggcaccagtaatacgccgatgaggatgcatcccatactgaagaatcccatccagctcaataaattaatatcattcagcacatactgggtgtaatagacctgaatcgccagtttgatattaaatgccgccagggtacacaagttagcaatgcataaaaccagcaatggcggattccgaaatatcgcgcaaaaacttttgagaatactggctttatgtccggttggcgttgtgtccacataatgctctttgacgcctctgtagcacagcatcataaaaataaagccgccaatggagaacataagtgccgcacaggcataaccgacggtactgtcagaaaaaaggctctgcaacggaataaacgccacggtacaaatcaatagccctatggttgcaccaccctggcggtaagccgcgagctgcgcgcgctcattcgggtttttggtaattgccgggatcatcgcaccatagctgcagttcatcagactgtaactaagtccaaacatcataaacagcgcggtggcaatcgtcgttttaaccggcaaacaaaaggtggtggcgataaactggagcgttgcaattaacgccgccggaaccgctgcatataaaataaagggacgaaatttgcctttaggcccaatatttttccggctgtcgagtaaaaatccggtgagcatatcggtaaacgcggtaaaaaacttcgccaccagaaagataatcccgccatagtaagcaggcatccctaattcatcggtataaaatttgaggagatacagagtaccgatgcagagcattaaattgctaccgacgtcgcccataccataggcgattttttcccgcagattcagttttaatgtcagtggattatggtcagacataatcactccttataacgccccgcagggcgtcgtttattattattacgccgtgcgtttacgggcttctatctcttccacaatgcggacatacatcttctcgttcaggctgtagaagcaacccatcgccacaatggtgactaccgccagtgcgcttgggtagatgaagatcaactggcgtaacccttcaatggtgtggtcagcctgtgcgacgttcggcacatagccaatttgcgtcagcatccagccggggaagaaaccagccagcgcctgagacactttgcgaaagaaggtaaaaccggtgtagaccgttccttcgctacgcacgccggtgcgccactcgccgtactcgacggtgtcggaaaccagcgcccagttcaggctgttaacaaacgcactgccaaagaacgccaggcaggagaacgccacgaagctgacgctaccgccgccgaagaaatagttgagcagatcgcccagcacccaaatcagcaggccgccgatataaactttcttcttgccaaaacgtctgacactggcaggcatcaggaatacgccgatgaaaatacagcccatgctgaaaaatcccatatagctcaacaggatgggatcgttaagcacgtactgggtgtaatagacctggatggcgagcttgacgttaaacgcccctaaagtgcagaggttggcaatgcacagaatgaacagcgggcggttacccgcaattgcgcggaaagattgcagcaggcccggcttttgcgccggattagcaggctgggtttcgacataacgctctttcacgccgctgtagcagatccacataaacagcaggccaaacagactaaacagcgtggcggcgaagatatagccaagttgctgattaccttcgataagattcataactggcacgaatcccaccgtgcacagcagcaggcccagcgtagcgccgccctgacgccatgccgccagactggcgcgttcgttggggtttttggtgatagcgggaaccattgcgccgtaggagcagttcatcatgctgaaaaacagtccgtaaagcataaacagaatagtggccatcaccgttttaccggtgacatcaaacggtgtgccgacaaagttggcgatcgccagtaaggtgaccgggaaactcgcatacagaataaaaggacggaacttaccttttggaccgatcttgcgtcgggaatccaacataatgccggtacccatatcggtaaacgcagtaaagaatttactaatcaaaaagataatgccgccataggtgcctggcagccccagaacgtcggtataaaacttcaaaagataaagcgtaccgatatccagcaggatgttagaggccaggtcgccaataccgtaagagagtttctctttaaagggcaggcgtaaagttgctggatcttccgttgtgatgtgactcatgcttgttctccctttgcccatgagtttccccacgggcggatgtgattagatgctttttaagctcgcgaacagtgccgcccattcgctatcggcgcgataaaagaccggcggcttgccgatgggcgcattaacggtaacttccccgccccggaacgcttcacccgtccaggcgtggacccagttatcctccggcagatagagcgtccagtcgctacggccttcttcatgcaccggagcgaccagaatgtcgcgacctaacaggtactgatatttcagggtgtaagtgtgcgcatcgtcttcgtaatgcaggaacagcgggcgcataaccggcaggccggacttcgcattcagcgcgacggcctctttcaggtaaggtttcagggtggtgaagacggtggtcatacgggcgaaatgggcgatggtttctgcgtcgccgtcaaactgccagttgtcgccaggacggttaccttcgtgggtgcgcatcatcggcgtgaaggcgctgaaatcgcaccagcgcagcagcagctctttgctgcgcttcatctcaaacagggtggtgtaaccgccaatgtcgctgtggtgcaggccatgtccggtcattgccaggctcagcgccgccgggacaacgctcgccaggccatcgtcgagactccagtcgacgttctggtcgcccgcccacatcatggtggagtatttctggctaccggtagaaccggcgcgcataaagaaaaggatctcgccgagcttgcccgtttcttcaagggcttcgtagttacacttcgcccacagcgcaggccaggcgttatgcataatttcggcactgacgccgttatgcaagtacgtgtcggtgggcagatactcgccgaagtcagccatccagccgccgcagccgagttcaatcatgttctttttgatcacttccttgaaccaggcgtaggcttctggattagtgagatcgacaacgccgccgtaaaactcgccaaactccaccagatagtcaccgccagaggcatcttttgccagatagccgtgttgtgccgcttcttcgcagagatctttatcgctggcaacatacgggttgatataggccaggaactgcacgccctcctgattccactgcttaatgcgactatccagttgcgggtagttttcgctgttccacttccagttccacatcacgcgtttgccaaaagaggtcatacgaataccggaccagtcctgcgcccagatgccgttgaccttcacgcccgcgttacgcatggtgtccagtttcttctggcacacttccgtcccgccctgaatgccgagcgttactccgtcataaatccagtcgggcagttctggctggcgtcccagcagggcggttaatttttccagcagggaaatgtatgtgtcagcacattcaaaacgcagcgttgctttgtcttcccacagcgccagttcatggtattccggggcactaaagtcgaagttcatatagcaactgttatcaacatggcagtaatacttctgcgtgctgacaaacgtaggctgtgggaagaaagtccagtaatagtcgccgcccgcattttctttgcagtcggcctgccaggtgacataggtttgtttgttgcgaccaacgccttgttcactggtccatagcgggaacggtttgccacgcagatcgaagtaggaaaactgttcgccgcagccgtagatatggtcctctggttgagcggcaaggcgcagccagatacggttgtggttaaggttgtcgttttgtagttccagcaataaacgcccctgatcgtcggcagagatattcagcgtggcgctaatgtcagaaccacggctgaaatgaattaaccaaccatccggactctggctgacgatggcgtcggtaagcgcaattttctcctgtagtttatctttaatgctgaaattaccgcggaacatatcgatatccgctataccactgccaatccataaacaaggattatctttgctatgggttaaaataagacgttgttgaaaatgtagggtaaaactgtcgttattctgatgaaattgaaaatctaataactgtggacgtggcgtatccataactaatctccatagagttgagaacgagattgttgccttcctgttattacaggcttatgtaaaatgattctcataaaactgatatataaaaactttacagaagctgagctgtttttaacttaataaattgaagatacataatgttgcctttagcgagtgaaatgttcttcaatgattttgactgctaatcaatacaagttattttctctgtccgtaaatattaaaaaacaggcggtgcggttttccactttccagtaataataagtcgataccactattaaaggcgttaggcgggcaactcataggttcaactgccagtccctgacgctgtaatttttcaccgctataaacctgcacccagagttgatcggaacaaaggcttacgctaagcgcctgctgtggatgggtaatggtcatttcccacaaatcattagcggttttaaaggtgtggtcgatttttgtcgcggctatttttttcgcctgcgtgaaatttaaatccagctcatcaacgtggtgaagcgttgtcggattcgcgtgctcatcgacggcataaacctggtttgccggaagctggaacagatattcatcaacagatgttaagttgcaggttaaataaggatgaatacccacgccataaggcgctgcgacagtgccgatattctggcttgcgatctcaacggaaagacccgtgtgtgcgttgaggctataaacaacttgactagccagcataaacggatagccgtaactgggcggcagaaaagctgtcagggtaacgctggtggcggttaattcactaatttgccagtctcgccaggcaagcagcccgtgaatagcggctttactactatgttcattaatgggtaactgatattcctgcccctgatagcggtaacagccgttggcgatccggttcggccacggaataagcactttacccagatgcgccagcggcatctcttcgggtttgtgcgggatgactaaatgacaaccctgaaaggttaattcagccagaccagcaccgacggtcacaatggtcgcgtgataatcccccgcggcaagactaacggtctgtccactgcaatgcatattggtgatttgcatacaaggcaccttaattaagctcatacagcctcccgtgaggctgatgtcaaacccaaaaactgcaccggacggtcccctcgcccctttggggagagggttagggagaggggaaaacccgcaccctattttcagatcagttatttcgcattaatatccagcagacccgctgcaaccgctggagccatgccgggcgctaacgggatacgcgggatcaccaggcaatgcagcaggtgataaatatcctgtttgccgtcccagactttggtggtgaccttattgtccgcatccagctcctgccaccaggaaccattttcatagtccatcaggtacttaatgcagtactcccaccatgtttgataccaggtttcatactggcgatcgccagtgacggtgtagagcgcgtaggccgtacccattgcttcgacgataggccaacgtacacgttcgcggaccaccggttttccttcccagtcaacggtataaacaatcccgtccgcgccatcgggtgcccaggcatcgcgcacggtggcgttaaacagacctttggcatcttctagcagccatgctggtggttgttcgcaacgggcttccagggcagcatggatgtgcagcattaaacggccccattcgatccagtggcctggtgtacctccgaacgcgcggaagcgatgcgccgggttatctttgttgtaatccggcagcggattccactgggtatcgaagtgttcgttaacgcgataatgattatttctggcgacgtcgtggataatcacggaagccacgcgaatcgcgcgatccagccattttttgtcgtgagtgacgtcataaacaatcaagaaagcttccaccgcgtgcatattggcattgccgccgcggtactcttcggttttgctgaaggcttcgtcccaggattccaggcacatctgctcttcttcgctccagaaatatttctcgataatttcaatggtgtaatcgagcagcttgcgcgcttccgggtgacccgttgtgacggcgctggcggcacccagcagagcaaagaagtgttgatagccctgtttggaggcatccaccacgccctcgtcattcacgcaggcataccagccgccatattttttatcacgcagtgcgccgttcatggctttgataccgtgatcaaccaagctgtaagcgccaggtcgacccatcgccgcagcaacggaataaacgtgcaacatacgagcggtgatccacagatgggtgcccatctcttctttgatttgccctttattgcctaaccagccaaaaccagtcggcactacggaatttttaccaaaatcaaagatgcggtcggtttcctgttccagccaacggttgtggcttagggtgttaaaccatttcattccttttatcctcatcttagcggcgtttagccatcatttcgtcgacgatatcgccaagttgttgtaatttcggtgcgcaaacgtcacgcagcatcagctcgttgtctggtaaaccgacgacgcttgcccagactgcacggcctgccaggaatccgcttgcgcccgccgtcattgccacgcgtacggcacgcgggaacagtttttcgtcgacaccggaagagaggatcacccatggcatattgatatggtcattcagacgttgactagcacagagaagctcttgttgcggacctttgccataaagcggcatttcaactttgtagaggtcagcgccactgtcgcccagctctttggcggcatcgatgatcgcttgttcgcgatcgaatttatcgccacgacgcggtgggcggacgactggctcaatgatgcttaccagaccgtgactgtggcacagttcgttgaactctttcaccatatccagacgttgctgcgcatcttcatcactacgccacagcaccagcagttttaaggctttgccaccgtcttgtttgatctgtagcggattgattttgcggtcaataaccacgctatcgaccggaataccgttgccaggaatgaactcatcggcggcgacaatcatggcgcaacttttggcaatcgcgttttgctcaaccacctggcggtagcagaattgttgatctaccagaatcgcgctggcataagggctgagggcctttgcagcgttaactttgaaatcagttaaaacgctatcggctaccggagcgggtgccccagccgcggcaaacatcatgcgcatggcttcgcgctgatcgaccgccagcatggcaaaaccgccgcttgcgcgcgtaatgtcgttgatggtgtacttattcattcatttattcctttatccagtcgttacatttttactttggcagtcatcccggcactgacacggacctgttccagaatggcggaccagtcctggcgaccgcgacccgctgcgcgcgcctggctataaacctcccgactggcggcccccagcggcattggcacatgcagctggttggcgacatcaagggcgatgccaagatccttatgggcaagatcgatcatgaaggcgggagaaagatctccgctgaggactttgtttggccaggaagtggtgaagtgacctttaccggcggcggtaccgctcatcactttgacggcaacatcgaagggaagattcagggcttcgcacaaaacggcggcttctgcgctaagcgcattgagcgcgatgctcatgtagttgttgatgagcttaacgcggatccccatgcccggaccgccagcgttgatcaactcactgcccatcgccatcaggatcggtgtggcacgttcaacttgttcagcggtgccgccagccagcagtaacagagtaccggtaatggcatttgcagaagtacggcctaccggaacatccatcatgctgaagcctttggcttgcatatcggcaatcaatttatcggtttgcagcggatggatggtggacatatcaatgaccagcgcatcggtagataagccttcgcaaacgccgttttcaccgaacaacacgttgcgcaccagatcgccattcggcaacatggtaatgataaattcggcatctttagcggcctgcgccgggttggcggcgggagtcgcacctttgtctaccagatgccgcacagcttcggcgttcacatcaaagacgcgaagttgatgcccttgctgcaataaattgctcgccattgggctacccatttgtcctaaaccgataaacgcgattgctgccataaccctctcctgaatacagttatgtcactttttgtcatttatgacatgctttgcttgtctgtttttgatcgtatttgtaatttatcgtcaaaaaattgacagccgtcactttttaaacaattggtgaaattaaaatgaacgcatcccaaaatgtttaaggaatgaccatgattcgtgttgcttgtgtaggtataaccgtgatggatcgcatctattacgtggaagggttaccgacggagagcggtaaatacgtggcgagaaattatacggaagttggtggcgggccagcggcgacggcagcggttgcggcggcaaggctgggggcgcaggtcgattttattggtcgcgtaggtgatgacgacacgggcaacagcctgctggcagagctggaatcctggggcgttaacacccgttacaccaaacggtataaccaggcgaaatctagccaatccgccatcatggtggataccaaaggcgagcggataatcattaactaccccagcccggatctgctgcctgacgcagagtggttggaggaaattgatttctctcagtgggatgttgtgctggcagatgtacgctggcacgacggcgctaaaaaagccttcaccctggcccgtcaggcgggtgtgatgaccgttctggacggggacattacgccgcaggatatcagtgagctggtggcattaagcgatcacgcggcctttagtgaaccgggtctggcgcgcttaacgggcgtgaaagagatggccagtgcgctaaaacaggcacaaacgctcacaaatggtcatgtctatgtgacccagggtagcgcaggctgcgactggctggaaaatggtgggcgtcagcatcaaccggccttcaaagttgatgtggtagataccacaggtgcgggtgatgtttttcacggcgctttggcggtggcgctggcaacaagtggggatttagcggagagtgtccgcttcgccagcggtgtagcggcgttaaaatgcacacgtcccggtggacgagccgggatccctgactgtgatcaaacccgatcttttttgagtctttttgtataaaatgccagggtgatggtttttcgaggaattttcatgagccttaccgaactaaccggtaacccgcggcacgaccaactcctcatgctgatcgccgagcgtgggtatatgaatattgatgagctggcaaatctgctggatgtctccacgcagacggtccgccgggatattcgtaaattaagcgagcaaggcctgattacgcgccatcacggtggcgcgggtcgggcttccagcgtcgttaatacggcgttcgagcagcgtgaggttagccaaaccgaggaaaaaaagcgattgccgaagcggtggcagactatattcctgatggtagtacaatatttatcaccattggtacgactgttgagcatgttgcccgggcgttacttaaccataatcatttgcggataatcaccaacagcctgcgtgtggcgcatattctttaccacaacccgcgctttgaagtgatggtgcccggcggtacgttgcgctctcataatagcgggatcattggccctagtgcggcgtcctttgtggctgattttcgtgctgattatctggtaacaagcgttggggcgattgagagcgatggcgcgttgatggagtttgatgtaaacgaagctaacgtggtgaaaacgatgatggcgcacgcgagaaatattctgctggtcgccgatcacactaagtatcatgctagcgcggcggttgaaattggtaacgtggcacaggtcactgcgctctttaccgacgagctgccgcccgctgcgctaaaaagtcgcttacaagacagccaaattgaaatcattcttccccaggaagacgcgtaaatttttgtgaccgttaacctggcttcataccttgccacatagccaaacccatcctttcccgctacagttaatttcttgtggcgcgaaaggaggcaaaaatgctctatatctttgatttaggtaatgtgattgtcgatatcgactttaaccgtgtgctgggagcctggagcgatttaacgcgtattccgctggcaagccttaagaagagttttcatatgggggaggcgtttcatcagcatgagcgtggggaaattagcgacgaagcgttcgcagaggcgctgtgtcatgagatggctctaccgctaagctacgagcagttctctcacggctggcaggcggtgtttgttgcgctgcgcccggaagtgatcgccatcatgcataaactgcgtgagcaggggcatcgcgtggtggtgctttccaataccaaccgcctgcataccaccttctggccggaagaatacccggaaattcgtgatgctgctgaccatatctatctgagccaagatctggggatgcgcaaacctgaagcacgaatttaccagcatgttttgcaggcggaaggttttagtcccagcgatacggtctttttcgacgataacgccgataatatagaaggagccaatcagctgggcattaccagtattctggtgaaagataaaaccaccatcccggactatttcgcgaaggtgttatgctaaaaaccattcaggacaaagccaggcaccgtacccgtccactatgggcctggctaaaactactctggcaacgcattgatgaggacaacatgacaaccctggcaggtaaccttgcctatgtgagcttgctcagtttagtgccgctggttgccgttgtttttgcgcttttcgccgcttttcccatgttttccgacgtcagcattcagttacgtcactttatttttgccaactttctgcctgctactggcgatgttattcagcggtatatcgaacaatttgttgccaattccaacaagatgaccgccgttggggcgtgcgggctgatcgtcaccgcgttattgttgatgtactccatcgatagcgcgttgaataccatctggcgcagtaaacgagcgcgaccaaaaatttacagcttcgccgtgtactggatgattttaacgctggggccgctgctggcaggggccagtctggcgatcagttcctatttgctctccctgcgctgggcgagcgatctcaatactgtcatcgacaacgtgctgcgtatttttccgttgctgttgagctggatctccttctggttgctgtacagcattgttcctaccatccgcgtacctaaccgcgacgcgattgtcggcgcgtttgtcgccgcactcctgttcgaagcaggaaagaaaggtttcgcgctttatatcaccatgttcccgagttatcagctcatttatggtgtgctggcggtgatccccattctctttgtttgggtctactggacatggtgtatcgtcttgcttggcgcggaaattactgtcactctcggggaataccgcaaactaaaacaagcagctgaacaagaagaagacgacgaaccatgattgcattaattcaacgcgtaacccgtgccagcgtcaccgtggagggagaagtgacgggcgaaattggcgcgggacttttggtgttattgggtgtcgaaaaggatgacgacgaacagaaagcaaaccgtctgtgcgagcgtgtgctcggctaccgcatctttagcgatgccgaaggcaagatgaatctcaacgtgcaacaggcgggcggcagtgtgctggtggtttcccagtttaccctcgccgcagataccgaacgggggatgcgcccaagtttctccaaaggtgcaagtccggatcgcgcagaggcgttatatgactatttcgtcgaacgctgccgtcagcaagagatgaacacgcaaacaggacgcttcgctgcggatatgcaggtaagcctggtcaatgatggccccgtgacattctggttgcaggtatgagccagcttccagggttgagtcgggaaacaagagagagtatcgctatgtatcaccttcgggttccacaaacagaagaagaattagagcgttactatcagtttcgctgggaaatgttgcgtaagcccctgcatcaaccaaaaggtagcgaacgcgacgcgtgggatgcgatggcgcatcaccagatggtcgtcgacgagcagggtaatctggtggcggtaggccgactgtatattaatgccgacaatgaagcgtccattcgctttatggccgttcatcccgacgtgcaggacaaagggttaggcacgctgatggcgatgaccctggagagcgtggcgcgtcaggaaggcgttaagcgcgtgacctgtagcgcccgtgaagacgcggtggagtttttcgccaagctggggtttgttaatcagggagaaatcaccacgccaaccaccacgccgattcgccattttttgatgattaagcccgtcgccactctggatgacattctgcatcgcggcgactggtgcgcgcagctgcaacaggcgtggtacgaacatatcccgcttagtgaaaaaatgggcgtgcgcattcagcaatataccgggcaaaaatttatcactaccatgccagaaaccggcaatcagaatccgcaccatacgctgtttgccgggagtttattcagtctggcgacgctcactggttggggacttatctggctgatgctgcgtgaacgccacctcggcggaacgattattcttgcggatgcgcatatccgctacagcaagccgattagcggtaaacctcatgcggtagccgacctcggtgccttaagcggcgatctcgaccgtctggcgcgcggacgaaaagcacgggtgcagatgcaggtcgaaatctttggcgacgagacgccgggtgcagtgtttgaaggcacgtatatcgttctgcccgcgaagccatttggcccgtatgaagagggcgggaacgaagaagagtaactgatggagaggggcggtgctgcctctctcattcaggtcatttatattagtccttggctatttcggttatattaaataagaactctataaatttttattcttcgttggctccatacgtgtcttgctacatcactgttcaggagcatttaaatattatttgtagaactgagtggcaattatcgcagataatgcttaattcatcatcttagttcatgtttgagcgatttttgatagtcaaaaccccctctggtgccatacttttctcataaatatttttaaaatctatagctaacaaatattatgcaaagataatggactagcatcattgtcagtatcattcatttactgctctgtatgttatgaataattatgttgtatgtttgctcttaaaccgtgggaaggaggctataatggttgccaatattaatctcattaaacaagaaagttattctgttgttaatttagaaaaacaactttcccgaactgttaccaacaaaattataacgatgagcaagtaaagaccggttggtggcagtactgaccggtctgtgatgaaagattaatttcaccttaaatcctggtgctgttaggatgctgacgtttttcggctacaccattcagattatgcaaataaatatctctgaatataatatattcatagcacccataattcatcctgggcgataactaaaccatttttgagtaataaatgaaacaactgcaacactcttattatttctggaaaacgcctcgcaaaaacaaaacaacatgcaaaaatccgctttttttaaatgattttccggcgtaattttcgcacatacattaatgagtaatatatgtaaggtattggtaatggcgatgaatacggtttttcttcatttaagtgaagaggcaattaaacggctgaacaagcttcggggctggcgtaaggttagtcgatctgcaattttacgcgaagcggtagagcaatatctggaacgtcagcaattcccggtgcgtaaagcaaagggaggcaggcaaaagggggaggtagttggtgttgatgatcagtgtaaggagcataaggaatgacaaaaatttttcattcttgaatataaaaaacagatgcccttattctggtattaatacaaggctgttttacttgaacttataataactgcaactgttacatcatatctggaaaacgcctcgcaaaaataaaaaatgatgcgtaaatgagctttctttaaagattcggcaagggtacttttctctccatagattcaaaaatgatattggcgagatatttatgaactctctggcaggtatagatatgggcagaattttactcgatttaagcaatgaggtgattaagcaacttgatgatctcgaggtgcagcgtaatcttcctcgtgcggacctattaagggaagcggtagatcaatacctgataaatcaaagccaaacagcaagaaccagtgttcctggcatctggcaagggtgtgaggaagatggtgtcgaatatcagcgtaagctgcgcgaggaatggtaatgggaaaaaatgatgtcaatcagattgctgacaacgtgcgcgttgttcatgccggatgcggcgtgaacgccttatccggcctacaaagtcgtataaattcaatgtattgcagtttattggtaggcctgataagcgcagcgcatcaggcaatcttacgcttgtcatcagtctcatgcccataaccttattgatgtggtggtgggtaaattgaggccaaaccggcactggcggcatagcttgaggtggtaacgcggaatacgagagatggtgtcgtcacaccctatgagctgtaatccgggcgacctgcgccacccggaaaacgtcagagattactctccttcacccggaaacaggaacgggttgatggaactgcgggcatagccttcttgctccattcgtgcgtccagtaccagagaggcgaggtcatctgctacggcttcgatttttggatctttttcctgatagagaattttcaggtaagtgtcgcagtcatcgcagctttcggctttaatcgcggcctgttcgtcatccaggctccagtaatgcagtttgccgctctgctcgcagttgctgcattttacgcgcactacgtgccattcagtttcacacaggttgcagtgcaggtaacgtagcccctgagtggtgccaatttgcaccatgctggacaccggcatagaaccacaaaccgggcaatattgacgttgctcgccgtattcagcgcgggctttgccggggatcagattggccatctgcgcccagtagaggctcagtgcagcccagataaacggcgctttatcgctgctgacggagctgaaatcagaggcaaacagcgcgctggccatatcttccagctcctgagtgcttgccttctccagattctcaatcactgccagcgccgggccgctcatttcaggtttcagctcagcaatcagcgccatcagcagcttttgccagtgcttatcacgcggcagaacgtgaatatccagcgggggcttgccttgtgcgctggcttctttaatgcgcgcagtcagatccatctccagcggatggtcgtacagcaccacttcctgggcgtgggcgataagcgcagcaaagcgcaggtaatcacccagaggattattttctgccagctcgcgcagacgctcggcgcggcggttgtataaattcttgagccgagggaacaataacggcggaatcatatccgccgtacgtttctcgctactacccagctcatcttgcgggattatgcgaatactcattcagctttcttttccgttgtcttgcggacctcacggtaccagcgcgggtgatgtttcttcgcccaggcgctggtaacccatccttccaccatggcggtaatcgtgcctttcacccaaagggcggcgtagatatgcaccatgataaccacaattaacgccactgcggcaaaactatgcagcattaacgcgaatcggatcaccgggatactgaaagcaggcgcaaaataaggacgccagataatcacgccgctcaccagcagcagaaccaggaaaataatcgccgcccagaaaacgcatttctgaccgaagttataacgcccggtgtcacctacttcctcgttgacgacgatcttacgaatattcttcgcccaaaagatatcatcccgattgattaggttgtgatgccagtaacggaaaaacatgatgatgaagctggcaaacataaccacgccgacaaacgggtgcagaattcgcgccagctgcggtgtgcccatgatttgcatcaaccagttgaaggacgggaacaaaaagcccagcccgctcaccgccgccaggatgaagcagaaggcggtgatccagtggttgatacgttccggcgcggtgtagcgcacgatggtgtcacgtcgtttcatttgcgctcctcgtctttctcttcgtgcagattattctcttcctcatccgcacggttcggaccgacacccacgtagtggaagatactggccgcaaaggtagccgcaaagccaacagccgcgagcggtttccagatgcctttccagaatttcacggtttcgctgatttccgggttctccggcaagccatgatacagatttggcttgtcagcatggtgcagcacgtacatgacgtgtgtaccaccgacgcctgccggatcgtacagacccgcattgtcgtaaccgcgggttttcagctcagcaacgcgctcgctcgccagcgttttcatgctctctttcgtaccgaagtgaatcgcgcccgttgggcaggtcttcacgcaggctggttcttgcccaaccaccacgcggtcaacgcacagcgtacatttgtagacgcggttgtcttccgggttgaggcgcggaatgtcgaacggacagcccgcaatgcaataaccgcagccaatgcactgctcggactggaagtcgacgataccgttggcatactgaataattgcaccttccgccgggcacgctttcaggcagcctggatcggaacagtgcatacagccgtctttgcggatcagccattccagtttgtcgttctgctccacttcgctgaagcgcattaccgtccagcttttggcgcttaaatcattggggttgtcgtacaccccaatgttattgccgacggtatcgcgaatgtcgttccactcactacacgccacctgacaggctttacagccgatacaggtggtaacgtcgatgagtttcgccacttcttcctggaagtcccgcgcctgaggcgcgggggtcagaccgttagtcgcggaacgacgaatgatatcttgagattgataagccatatgtcgtctccgttacaccttttccacattcacaaggaaggacttaaactccggcgtctgcgtgttcgcatcaccaacgaatggcgttaaagtattggcaataaagccttttttagctacgccttcatagccccagtgaatcggaataccgatggtatcgatatctttgccgttcgctttcagcgtgcgaatacgtttggtcaccaccgctttggctttgatatagccacggttggaggagactttcacggtatcgccctgggcaatgccaagtttattcgccaggctctccccgatttccacaaactgctctggctgcaaaatcgcgttcaacagcgcgtgtttggtccagtagtggaagtgctcggtcagacgataggtggttccgacatacgggaacttatcggctttacccaatgcttcggcgtcgtctttaaagatacgtgcagccgggttgctgataacgtttggatgcagcgggttagttcccagcggcgtttcaaacggctcgtagtgttccgggaacggaccttccgccatcttatcgagggcaaacagacgccccatgccttcctgctgcatgataaacggcccgacgccgctacccggaggcgctgcgctgtagtccggaatatcccagccggtccacttagtgccgtcccatttcagcaactgacgcttcggatcccacgggttaccctgcggatctgcggaggcgcggttatacagaatgcggcggttaagcggccatgcccatgcccagcccagcgtgttaccgaggccagacggatcggcgttatcacggcgtgccatctggttgccttccggcgtccagctaccggcgaaaatccagcagccacaggaggttgtaccgtcatcgcgcaattgggcgaagctactaagttgttggcctttcttgacgataaccgcaccggttgccggatcggtaatatcggccagcgccttaccgttgctctccatcgccacttcttcactagatggctcatgcggaatggcgtagttccatgtcatgttcagcacctggtccgggttcgcgccaccctgttcggcatacatcttgcgcaagcgcaggaagataccggagaggatctcgccgtcagtcagcgcaatccccggggcgtccgcacctttccagtgccactgtaaccagcgaccactgttaacgatagaaccgttctcttccgcgaagcaggtgcttggcagacggaacacttcggtctggatcttgctgctgtcaacttcgttcagctcaccgtggttctgccagaagttagaggtttcagtgttcagtgggtcgatggtgacgaggaacttcagtttgctcagacaaccgatcactttgtttttgttcgggaaactggcaacagggttaaagccctggcagatatagccattgaccttgccctctttcatcatctcgaagtattgcaggacgtcgtagcctttatcccacttcggcaaccagtcaaagccccagctattttccgccgtcgctttatcaccaaagaaggccttcatcatagagacgaagaatttcgggtagttgccccagtagtttacctggccttccagcagcggttttggcgtgttggcggtaaggtaggtttgcagatcggtctgcttctcgcttggcagcgtcatgtaacctggcaggctctggctcagcagccccaggtccgtcagcccctgaatattggagtgaccgcgcagggcgttaacgccgccgcctgccatccccatattgccgagcagcagctggatcatcgccatcgtacgaatgttttgcgcaccaacggagtgttgcgtccagccgagggcatacaggaagctggcagttttatcgtgagcactggtttctgcgatgtattcgcagactttcaggaacgcgtcttttggcgtaccacagatgttttcaaccacatctggcgtgtagcgggaaacgtgctgtttcagcaagttccacacgcagcgcggatgttgcagcgtggtatcgcgtttggcgaagccgttttcgtccagttcataagtccaggaggatttatcgtacttgcgtttttccgcgtcgtagccggtgaacaggccatcttcaaagccgtaatcctcacgcacgatcaggctggcgttggtataggcttcggtgtattcgcggttgaatttttcattgttcagcaggtacagcaatacgccactcaggaaagcaatgtcagtaccggaacgaataggggcatagtagtcagctaccgccgccgtacgcgtaaagcgaggatcgatcacaatcagcttcgcgccgttgtgaattttggcttccatcgcccagcggaacccgaccgggtgagcttcagcggcgttaccgcccatcaccacgacgaggttggcgttcttgatgtcgacccagtggttggtcatcgcaccgcgaccaaatgttggagcaagacttgctaccgttggtccgtgtcagacacgcgcctggttgtcgaccgcgagcatacccagcgcgcgggagaatttttgcgttaaatagccggtttcgttactgctcgcggaagcacacagcatcccggtggagagccagcggttaacagtcacgccttcggcgttttgcgcaatgtagttagcatcgcggtcttctttcatcagtttggcgatgcgatcaaacgcctcttcccaactgatttgctgccatttatcagaacctggcgcacggtattccggaaacttcagacggctttcggagtggatgaaatccaccaggccagcgcctttcggacaaagtgcaccgcggttgaccgggtgatccggatcgccttcgatatggaagatagatgctttggcgttttttgctccgtcaccgaggctgtacatcaacagcccacagcctacggaacaataggtgcaggtattacgggtttcgcgggtgcgcagcagtttatactgccgggtttccgcgagtgctacgctgggtgcaaaacccagtgccgctgccgtggtgcctgccataccgccagcgcagatcttaaagaactgccttctgctgacctgcatggattgctccttgtttcgacattgtcacgtcccatttacattcgcttgctgcgtgtgcagggagtgggagttatttttctttgcggaaggggccgcaaaggtccagaattggctcaatttccctccatccaggaagggtttgtaacagaataccataatgttggtgtgtgtgttcttatctggttaagagaaagtgaaaaaaacacagcgaaaagaaatcgaaaatgtgacaaatatcacaggtgttcgtcaaattgagttatggcggcgtgatgatttacaacacccacggttagatgaggtcgcggaagaagttcccgttgcgctggtctacaacggcattagccatgtggtgatgatggcgagccccaaagaccttgagtactttgcgctcggttttagcctttccgaggggattatcgaaagtccgcgcgatatcttcggcatggatgtcgttccttcctgtaatggtcttgaagtacaaattgagctttccagccgccgctttatggggttgaaggagcgccgccgggcgctggcgggacgtacgggctgtggcgtatgcggcgtggagcaacttaatgacatcggaaaaccggtgcagccgctaccgttcacccagacgtttgatctcaacaaactggatgatgcattacgtcatctcaacgattttcagccagtggggcaactgactggttgtactcacgccgctgcctggatgttgccatctggcgaactggtcggcgggcatgaagacgtgggtcgccatgtggcgctggacaaactgttaggccgccggagtcaagaaggggaaagctggcagcaaggtgcggtactggtttccagtcgtgccagttatgaaatggtgcaaaagagcgcgatgtgcggcgtagagattttgtttgcggtgtctgccgcgaccacgcttgctgtagaagtggctgagcgctgtaatctgacactggtaggtttttgtaaaccgggtcgggcaacggtttatacccatccgcagcgtttgagcaattaattaaaataagtcctgcgaaatatattaaattgcaggacttattcatttcgtgaattttattattttatttataaacaaaatgcgtgtagtggcgttttcttttttcatttattatgttcactctcttatctatatatttataaggcaattaaatgaaaaggaatttattatcttccgctattatagtcgccatcatgtccctcggtctgacgggttgtgatgataaaaaagccgaaacagaaacgctcccgcctgccaatagtcaacctgccgcaccagctcctgaagcgaaacctactgaagctcccgttgcaaaagcagaagctaaacctgaaacacctgcgcaaccggtggtcgatgaacaagcggttttcgacgaaaaaatggatgtctatatcaagtgctacaacaagttacagatcccggtacagcgcagtctggcgcgttatgctgactggctgaaagattttaaacaggggcctaccggtgaagagcgtactgtttatggcatctacggcattagtgaatccaacctcgctgagtgtgaaaaaggcgtaaaaagtgctgtggcgttaacgcctgcgctgcaaccaattgatggcgtggcggtgagttatatcgatgctgccgtggcgttgggtaataccattaacgaaatggataaatattacacccaggaaaattataaagacgatgcgtttgcgaaagggaaaacgctgcaccagacattcttaaaaaatctggaagcctttgaacctgtagccgaatcttatcatgcggcgattcaggaaattaatgataagcgtcagcttgcggaactgaaaaatattgaagaaagagaagggaaaacattccactactactctctggcagtcatgattagtgcgaaacaaattaataacctgataagccaagataagtttgatgcagaagcggcaatgaagaaagtgtctgaactggaaacgctagtggcgcaggccaaagaagcggataaaggcggcatgaatttcagctttattaatagcgcaggccagtatcaactcgaggctaaaaaatacgttcgccgcatcagagataaagtcccgtactctgactgggataaagagcaacttcaggacgcaaacagtagctggatggtcgaagactctttcccgagagcattacgcgagtacaacgaaatggttgatgactataatagcctgcgttaaacgtttttgatgataaatgcagtgtcggatgcggcgcatccgacacagttcaccccttgtgaagtaactccataaatgcctcatatcctgttaacccggcaataatctccgccggatgctgacacaatatgcttgccagatagctaaatatttttagctcatgacgcgcatcggcggcggcgcaggcgatcaagacatggttaatgacttcgttattcacctcaactggttgggcgagggtaataaaaaatccacgaaaacgtcgctcctgttcgctccagcaatgtgggatggcgaggcgattaacaatcaggttttcaccttcgccttcgcgggcgatgatgcgttgtgcttcatcggcggtaatatggtgttgtgcgactaattgcgcacaaatttgccgggtaatatgttgccagctttcaccgcgtacattgctataatgaaaacttccgggggcagagaaaaaacgctccggctgttggcgaataaatgccgtcgccagaaaatgttttatttgttcgataccggcagccgtaatgatattttttacggtgatgtaattatttaccgcgtcatccagtaaataatggctgttgttaatgatcaataacggctcaatctcttcgcgaatggcaacaagttcgcttaagctacgggcaataattacccgacaatttaaaacatcgcgctcaatggcgagctgattaatagtggcaatcgcgttctggtcgctgagcaaaatgatcggctggcgttcgttttgatgccgctccagcgcacaggcaaaatacaaaccgatcagatcgctgtcgaaaaggggaatatcgagctgttcacgcagtagcgtaataaagtgcagactcatatcaaaggccgcaggccaggcggctttcaggttattcatgctgctctggcggtgctcagcaatccacactggtgcggcaaggcaacgtaataaatgcccggtaatattctcaaccagctgcgcatcaataatattcaaactcgcgatgcccggcaccctttgcagcaacccctgcacattatcggcactaattacctgcgcttgctgatgctgtttctctatcaaacccgtcagggttcttacagcgttatcaccaagaaacagaccgctatgttcaacgatttgttttatctcgtcaccgggatattgcggccactcatcggtcagttgattacgcagggcgtaaatcgccagaatcaggctggagagataatcaccctgcatgagcggccagcggtgttggttgtcgcaggccgtggataaatgctgaaggttgtctcgtgttatgcccgccagcggaattaaaaacggatctttgcgcagcaagttcgccagcaagataacgcgtttctcttctgtctcatcaatgaaatggcccaaaccagggcggctggccaggcaacaagtgcgttcataacgctgttttaaccggggcagacgctctgctacccacgtttctggcaaattaagcgcgctggcgagttgcgcacggggagtgaaagtattcagtaataacagcgccagcagccgatcgtcgttatcgtgcttttgcagcaactgaaaaaagctgcggcgctcgaagatttccagctgatagcccgcactgccactggcgaaaatgcgggctttgccgttaagggtgaagttgagatagtcaatatcacgcaggatggtcctgccactaacgccagtctgttgcgccagctcgccaggcgtgcgcggctgttgctccagcagatcgacaatctttaactggcgttcgtttagcattaatccacctgacggaactggctaaacgcgttgactttctccgcagttaaggtcgtcagaaaaccccgtatcagcgtgagcagagcttcgtaatcggctttactaatcataccgctgttggcgtgcagataacgagttggcagacacagcgcgacaaccggacgcccgccgcccatcacgttgtagcgcccgccatccgtcgcaccggttttcatggtggaaaattgcagcggtaaatcgttatgtgcggcacagctttttaacgctgctaccagtttctggttggggaagtagcgcttgtcaaacagcatcagccccggcccctggcccagtttcagcgggtatttaatgttatcaatgcccggaacatcgcccgctacggcggtatccaacacgatcacgacgtccggtttaatgtgttccgcgctggtttgcgccccgcgtagcccaacttcttcttccacactgccaacgccatacagcgtaatttcgggattattcaccgtctgcaatagttcagccatcattgcgcagccgatgcggttatccaacgccttgccgaccactttatcttcgccccagcaggcaaaattggcttccgggctaataaaattaccaatttccacgccgcgcttttccacctcttcgcgactgttcgcgccaatatcaatgaacatctcatcaaaactcagcggttgttgcttttgcttttccgttaacgcatgaggcgcgacggaaccaatcacaccagggattttcactcccttgtgtgtgcgtatggttacccggtggttgagcatgctctgattccaccagccgccaatggtggtaaaacgcagaaaaccgctctcgtcgatgtgggtgaccataaagccgacttcatccatatgtccgacaacggcaacttttggacctttattccccttacgggcaacaaagctgcccagaccatcgaaggtgatttcattcacgcaaggttccagcgtgtttatcagaatgtcgcgaacttcctgttcatcgccgctgacggcgctggcttcgcacaactgttgcagtaactcaatgttcatggacaagctcctgttgcgcggctttcgctttgcggcgtaaccacaatcctttcaggacgataatgaaactaatgttcagcgcgaggccaatcgccagcaccagataaaagctacccaccgggctcatcaggccgatcagcgggtcaaagatacccaaaccaggtgccagacgtttgattccgaaagcgatcaccagcacgccggtaatgccgcccgccagcgtattggcggtaatcatcggcaacggagctgccagagcgtaaggaatagccggttcggttgcgactgtggcaccgaccacaatggcactactggcagcctctttttcctgtcgggtaaacagtttgggcgcaatgaacgtcgcaagacccgccgcgacgggcggcatcagcgcgacaacgccgacgatggcgtaccagtcataaatgtgtttttccagcagactgaagcagaagaaccaggcggttttattgatggggccgcccatatcgaacgccagcatcgcaccgaccagaaacgctgccgcaaacttcatacttggaggaatggtattcaggaagtggagcagcccgcccatgaggtcggacatcaccggcccgataacgtagtaagtgagcacgccgaaaaccagcagagtaacgaacgggatcagcatactaccgagcagcggttgtaatgctttgccaaggcgcactttgcggaaccagaagacgaaatagccaatcgccagccccagcaccaccgcgccgaggaatcccgcaccgctctgggtgccgagcagcgctttgtcgttcgccagatagcaaaccagaaacgccggagcgaaagccggtttatcggcaatgctgctggcaatataagcgcccatgatggggatcataaaggtgaagccaaggtaaccgatggattcaactacccaggtaaagctcggcgcgcctttgctcatatcggtatacggcaaaccgaactgcaccagcatgttggcaagcgccaccaggataccaccgccgatgacaaacggcagcgccgcagagacgcccgccatcaggtggctcatcacgctaccgctttgcacttcctgtttgccaagcttcacgccgctatctgcggcaaaaagctggctgtttgtcggtaattcgctgaaaatctggtcgatatttttcaacgcctgggagatggcaatctcataaactttcttcccggcaaaccgcgcgcgatcatcaccgctcaggccacgcccggtagcgagaatgacgtaatcggcagcggcaatctcttcgctggataagcggttttcaacgccactggacccttgagtttccacttttatggtatgaccgagagaacgggctttctgttccagggcttccgccaccatgtaggtgtgagcgatcccggcggggcagttggtgatcgcgacaatacgtaaggaactctccatcgccacttccttaactgctgagggtttgatttaacaaggcaagcacctggtcggtatcgccctgttgcagttgatgaataaattccttgtgaataattttgcgacacagtgtgccgatgattttgacctgatcctcttcgccgctttgcggcacgccgaggcagatccagcaattgacgtcttcgccatcgctggctttccagtcaatagcctgcgctttgcgggcgaataatacgaacggttgtttaacgcaggcgcttttaccgtgcggcacggcgacaccggaaccaaatccagtagagtgcattttttcgcgcagcagcagggtttgcaggaactggtgactgtcggtgataaaaccgttttgtaacgctattgtcgccaactgcttcagaacggaataagcgccattgccctgaatattcaggtcaatacagcttgcagtaagagctgccattaatcggactccataaaatatattttaatcaattgtaatggtggagcgattaagtgatgagaggcgatatgtcggtaaacaatgacaatttgagacagagtgaaaggtcagatttgcggagtaatgcacataatggttatttaaataaaccacatgaatcattaatgggttattcattatttttgtgatttactcacaatgtatcagggaaatataacttaccgggagatgtaatatgtttaatttttcaaatcgaaatttaaaatattgtgccggaggcatctctggcacattgggcaattacggcaggtaaaacacttcttgcagctcgctactcaccgggctgttatccgggttagcgggcataacatcggtcatatatttccaccaacgttggcagacatcagtgctggcaaccgcattccagcgttcttcagattcaatctctaccatggcaaacagcagattacgcgctttgtcgagatagatggcgtagttatgcgcaccgtgagatttcagcactgcttccagttctggccagatgggattatgccgacgctgatactcttcgtgggcgtcggggtttacctgcatgacaaaggctttgcggatcatgtttgctccttacagcgccagcgcactggcgagtggcgtaacgccgaaacgcttgccgagcgctatcaactcttcacggctgatggtctgtttcatgccgcccatgctataaaccttcactaatacttgtgcacttttttctgcggtgtcgattaaaccgaaggtttcatccagcgtcggtccgctgccgaagacgccgtggaagggccacaacaccaggctatgtttttgcatctcttgtgcggtcgcctggccgatttcgtccgtgccgggcaccatccacggcaaaatgccaacgccatccgggaataccaccagacactcggtgctgccttcccacagttggcgagtgaagaccgcggtgtcgttttcaagtacataggtgagggcgatcaggttggtggcgtggcagtgcatgatcacccgatctttgccgttggtggctttaatgcgctcgcagtgggaaaggaagtgagccggaagttcggaagtggggacggcttcgttggttaacccccaaagaatgtggtagcccgcgccgtcgctgtcgacttttacgatgcctaagttagccgcaggatcaagctggacgttacggaagaatttgccgctgccggtgacaataaacggtgtatttgccagtaaaggcatgggctggctgagcgggatatagcgcggttgttggtggaaattgtcgtgatatggtgcgatatcggcgtcatccaggcgtagcgtcaggttgccgccgttgcgctcatcccagcctttcagccaggcgtcggtggtggctttgatcattccctggacaaaccaggactgagtaatgttttgcatgttctgtgttcctgtaaattcggtgttgtcggatgcacgacccgtaggccggataaggcgctcgcgccgcatccggcaatcaatgcctgatgcgacgctgtcgcgtcttatcaggcctacaactattgccgacctgtaggcctgataaggcacttgtgccgcatccggcaatcaatgcctgatgcgacgctgtcgcgtcttatcaggcctacaactgttgccgacctgtaggccggataaggcacttgtgccgcatccggcaatcaatgcctgatgcgacgctgtcgcgtcttatcaggcctacaactattgccgacctgtaggccggataaggcacttgtgccgcatccggcaatcaatgcctgatgcgacgctgtcgcgtcttatcaggcctacaactgttgccgacccgtaggccggataaggcgctcgcgccgcatccggcagtgtttacccgcggcgactcaaaatttctttctcataagcccgcacgctctccagccattcgctacctgctggcgtatcgtgacgttggcaatacatttcccagaccgcctgccacggcaagcttttctgctcttccagcagtgccagacgcgcagtgtaatcgcccgccgcttccagcttgcgcagctcagcggtaggttccagcaacgcacgcagcagggcttttttcatattgcgtgtaccaatgacccacgcggcaatgcggttgatagaggcatcgaagaagtcaaggccgatatgcacccggtcaaacagatcgtgacgcacaatctcactggcaattgcctgggtttcatcatccagcagcactacgtgatcgctgtcccagcgaaccggacggctgacgtgcagcagcaactgcggcacatacagcatggcggcggaaatcttgtcggaaatcacttcagtcgggtggaagtgcccggcgtccaggcacagcgcagtctggcggctggtggcataccccatgtaaaactcattggagccaaccgtgtagctctctgcgccaatgccaaacaatttgctctcaacggcgtcgatatggtgcgcagggtttagcttctcgctgatcacctcatccagtgctgccagcagacgctgacgcggggcgagacggtcaacggtgatatctttcataccatccgggatccagatgttcatcacgcttggtgtgccgagttgctcgccaaaataggcgctaacgcgacggctggctttgcagtgatcaatccagaactggcgaatgctgtcgtcggcatgggaaagcgtaaagccatcggcgcttagcggatggctaaagcaggaggggttaaaatccagaccgagctgattggctttcgcccattcaacccagtttttgaagtgctctggtttgatctggtcgcggctgactggcgtatcactttccagatagatggcatgtaaattaagccgtttcggccccggaatcagccgcatagcctgttccagatcggcacgtagctcactggcattacgcgctttgcccggataattgcctgtggcctgaatccccccggtcaggctaccttccgggttttcaaaaccggaaacatcatcgccctgccagcagtgcatactaacgggtaaacgatcaagttggcgcagcgcctcctcgacatcaatccccaccgccgcgaaacgctgtttcgctagctcccaggcctgttccagttgagtggtcatgcgcaaagctcctttgtctgtcgtgtagagtgaatctgcgccacatagtgggcaatttcactgtcaggattaggggtaaaggtggtcagattcgcggtggtgctgacgacctgacggaaatcatccacattgttgagttcatccagcgtcattaactggatgccgatattgccgagcgtgctggcttcaacaggcccggcgatcacccgaataccgcaggcatcggcgcatagctggttgagcagcgtgttctggcagcctccgccgacaatatgcagttggctgaaatcttcaccgcgcagctgcgccagctcatgcaacacatcggcatacagcagcgccagactgtcgaaaatgcagcgcgccagttcagcatcactttccgggatcggttgcgccgtttcccgacacgcagcctgaatttcgctgcacatcgtctcaggattaataaagcgatcgtcattgggattgataatgaagcggcaagccggaagtgcctgtgtcgcggagataagcgccggaagatcgttgatttgctgctcctgaagcactcgctgaagcagccataagcccataatatttttcagcacccgatagcgaccttccgccccgccttcattggtgatgttggctgccagtgccgtgtcattggtaaatggcgtctggctttcgaagcccatcaaactccaggtgccagaagagagataagcagcacgactgccgtttaacgggctggcgataaccgcgctggcggtatcatggctggcaacggcgaccactggaatctcattaccctgcgggcaaatccagtgacctatgacattacccggatgcgtcgggcgaccaaaccaggctttgttggccccgctccacgccagtaggctctcgtcccagtcgtcgctattgatattgaccagttgcgtggtcgtggcgttggtatattcccagttcatcttgccggtcaggcgataactgaagtaatccggcatcagcagagcgtgagcaatgtgtggaataagttcaggttgttgctccgtcagcgcacgcaactgataaagcgtattgaagggcagaaactggatgccgctacgttgataaatatcgcgtttgccgagttgttgttgtgcctgcgccattaggccattggtgcggctatcgcgataagcaacgggcaggcccacacgctgaccctgttggtcgagcagcacaaagtccacgccccaggtatcaatcccaatgctatcgatacgaatcccttcctcgcacaccttgtttaatccaaggcgaatggcactttcaaggctatccacatcccaggtgacatagccgttctgactatgcagcccattgttaaaacgatggatttcgcgcagcgtcaggctgcggcattcacgctcgtaacgcgccagcatcacgcgcccactggatgcgccgagatcgacggcgacacaattgcgaaaggtcataatgtgatcctgctgaatttcattacgaccagtctaaaaagcgcctgaattcgcgaccttctcgttactgacaggaaaatgggccattggcaaccagggaaagatgaacgtgatgatgttcacaatttgctgaattgtggtgatgtgatgctcaccgcatttcctgaaaattcacgctgtatcttgaaaaatcgacgttttttacgtggttttccgtcgaaaatttaaggtaagaacctgacctcgtgattactatttcgccgtgttgacgacatcaggaggccagtatgaccgtattacatagtgtggatttttttccgtctggtaacgcgtccgtggcgatagaaccccggctcccgcaggcggattttcctgaacatcatcatgattttcatgaaattgtgattgtcgaacatggcacgggtattcatgtgtttaatgggcagccctataccatcaccggtggcacggtctgtttcgtacgcgatcatgatcggcatctgtatgaacataccgataatctgtgtctgaccaatgtgctgtatcgcagcccggatcgatttcagtttctcgccgggctgaatcagttgctgccacaagagctggatgggcagtatccgtctcactggcgcgttaaccacagcgtattgcagcaggtgcgacagctggttgcacagatggaacagcaggaaggggaaaatgatttacccagcaccgccagtcgcgagatcttgtttatgcaattactgctcttgctgcgtaaaagcagtttgcaggagaacctggaaaacagcgcaagtcgtctcaacttgcttctggcctggctggaggaccattttgccgatgaggtgaattgggatgccgtggcggatcaattttctcttagtctgcgtacgctacatcggcagcttaagcagcaaacgggactgacgcctcagcgatacctgaaccgcctgcgactgatgaaagcccgacatctgctacgccacagcgaggccagcgttactgacatcgcctatcgctgtggattcagcgacagtaaccactttagcacgctttttcgccgagagtttaactggagtccgcgtgatattcgccagggacgggatggctttctgcaataacgcgaatcttctcaacgtatttgtacgccatattgcgaataatcaacttcgttctctggccgaggtagccacggtggcgcatcagttaaaacttctcaaagatgatttttttgccagcgaccagcaggcagtcgctgtggctgaccgttatccgcaagatgtctttgctgaacatacacatgatttttgtgagctggtgattgtctggcgcggtaatggcctgcatgtactcaacgatcgcccttatcgcattacccgtggcgatctcttttacattcatgctgacgataaacactcctacgcttccgttaacgatctggttttgcagaatattatttattgcccggagcgtctgaagctgaatcttgactggcagggggcgattccgggatttaacgccagcgcagggcaaccacactggcgcttaggtagcatggggatggcgcaggcgcggcaggttatcggtcagcttgagcatgaaagtagtcagcatgtgccgtttgctaacgaaatggctgagttgctgttcgggcagttggtgatgttgctgaatcgccatcgttacaccagtgatagcttgccgccaacatccagcgaaacgttgctggataagctgattacccggctggcggctagcctgaaaagtccctttgcgctggataaattttgtgatgaggcaagctgcagtgagcgcgttttgcgtcagcaatttcgccagcagactggaatgaccatcaatcaatatctgcgacaggtcagagtgtgtcatgcgcaatatcttctccagcatagccgcctgttaatcagtgatattagcaccgaatgtggctttgaagatagtaactattttagcgtggtgtttacccgggaaaccgggatgacgcccagccagtggcgtcatctcaatagccagaaagattaattcgccatgccgatgccgacgatgttagcggcgacaataatcaccacacaaccgaggctcaacaccgttaccggacggcgtcctgcattgttccactctttcagcaccagcccgacgataccgccgcacaatacatagaaactcatatgcagcatccaactgatgtagtcatactgcgccggaatgcgggcgtggccccaggcatagaaaaagaattgcagataccacatcaacccgcccagtgtgctgagtaacacattgtgaatgatcaggctttttgccaggctgaagtcggcttttaggctcaaatccttcacttttgccagacgaataaaacagaaaccgaggttaatgatcgcgccgccgcccatgatgacaacatagcttggcagagcgacatacagtggatcgacgccaagtgcggcagcggcttcatgcatcggttttgcggcgttcatcgcaaaggacatcccggcagagaaaatgccgcacatcaccgccagcaccagcccttttttcagattgaactcttcggctttaatgcccatcttgcgctctttcaactgcccggcgcgagttacaatccctacgccaatcagcgccaccagaacgccgagcaacgtcatgcgtccgccttcggtgctaatcaacacatcgaaattgccgttgataattggcgtcatcagcgtaccgacaatcaacgtaatgccaatggcgatgccaattcccatgctcatgccgagataacgcatggtcaggccgtagttgatattaccgatcccccacatagcgccgaacagaaaaacaggcagtcgcgtagagagactaaagctgctgtaatacgcccagaaattcggtagtaacagggcgctgatggcccacggcagaataatccagctaacaatcccaccgacactccacatggtttcccaactccatttttttacttttttgaacggagcgtaaaaacaggctgcactggccgcgccgatcaaatgccaaaatatccccatcgtaatcgcgttactcatcttcttatcctcatcatttttcgtcgcgtcacatctccgacgagatgagtgtaaaaatcgtgctgtcgattaacctttcgcctgttgccgccgttgtcgatttactggcaatcacggcattaagtgggtgatttgcttcacatctcgggcattttcctgcaaaaccatacccttacgaaaagtacggcattgataatcattttcaatatcatttaattaactataatgaaccaactgcttacgcggcattaacaatcggccgcccgacaatactggagatgaatatgagctataccctgccatccctgccgtatgcttacgatgccctggaaccgcacttcgataagcagaccatggaaatccaccacaccaaacaccatcagacctacgtaaacaacgccaacgcggcgctggaaagcctgccagaatttgccaacctgccggttgaagagctgatcaccaaactggaccagctgccagcagacaagaaaaccgtactgcgcaacaacgctggcggtcacgctaaccacagcctgttctggaaaggtctgaaaaaaggcaccaccctgcagggtgacctgaaagcggctatcgaacgtgacttcggctccgttgataacttcaaagcagaatttgaaaaagcggcagcttcccgctttggttccggctgggcatggctggtgctgaaaggcgataaactggcggtggtttctactgctaaccaggattctccgctgatgggtgaagctatttctggcgcttccggcttcccgattatgggcctggatgtgtgggaacatgcttactacctgaaattccagaaccgccgtccggactacattaaagagttctggaacgtggtgaactgggacgaagcagcggcacgttttgcggcgaaaaaataatcatttgccgcctgctgcaatgaggcgtataggccgcatatcagcttaaaaaatgaaccatcgccaacggcggtggtttttttgtgatcaatttcaaaataaaaacaatgatccgataaaaataaaacagcgtttcaattgatgtggttttgatcacttttattgattaaatgaatgtctatcttcgtttccatcaacactgatgctccattgaggaattacgcatcagcccttaaaaatatgccgacaggtgatggaaatgcagataaaacgcagcattgagaaaatcccggggggggatgatgctcgtcccgctattccttggcgcactgtgccacaccttcagcccgggggcggggaaatattttggaagtttcaccaacgggatgattaccggtacggtgcccattctggcggtgtggtttttttgcatgggggcgagtataaaattaagcgcgacgggaacggtactgcgtaaatccggtacgctggtggtaactaaaattgccgtcgcgtgggtggttgcggcaattgccagccgtattattccggaacatggtgttgaagttggattctttgccggacttagtacgctggcgctggtggcggcgatggatatgaccaatggcggactttacgcttccatcatgcagcagtacggcacaaaagaagaagctggggcatttgtgttgatgagcttggagtccgggccgctcatgacgatgattattctgggcactgccgggattgccagctttgaaccgcatgttttcgtcggcgcagtattaccgttcctggtgggctttgccctggggaaccttgaccctgaattgcgagaatttttcagcaaagcggtgcaaacgctgattccattctttgccttcgcgctgggcaataccattgatttgactgtgattgcccagactggtttgctggggatcctgttgggtgtggcagtaattatcgtgaccggtattccgttgattatcgccgataaattgattggcggtggcgatggcactgccggaattgccgcttccagttccgcaggggccgcggtagcgacacctgtgctgattgcagaaatggtgcctgcgtttaaaccgatggctccggcagcaactagcctggtagcgacggcggtcattgtgactagcattctggtgccaattcttacctctatctggagtcgtaaagtcaaagccagagcagcgaaaatcgaaattttaggtacggtgaaataaacctgcttccttaatccccacagccggatgaactaacgttcgtccggtttgctattgagttcctgcctggatacttaccgcgaaaacagcacgcctgacataaaataaatatggtctaatggggaaatttctcgtggagagggaacagatgcgatatccggttgatgtatacacaggcaagattcaggcttatcccgaaggcaaacccagcgcaattgctaaaatccaggttgatggtgagttgatgctgacggagctggggctggaaggtgacgagcaggcggagaaaaaggttcacggcgggccagacagagcgctgtgtcattatcctcgtgagcattatctctactgggcgcgggaatttccggaacaggcggagttgtttgttgcgcctgcgtttggtgaaaacctcagtaccgacggcctgacggaaagtaatgtttatatgggcgatattttccgctggggagaggcattaattcaggtcagccagccgcgcagcccttgctataaactcaattaccattttgatatcagcgatatagcgcagttgatgcaaaacacaggtaaggtggggtggttgtatagcgtgatagcgccagggaaagtgtctgcggacgcgccgctggagttggtttcccgtgtcagcgatgtgaccgtgcaggaggctgccgccatcgcatggcatatgccgtttgatgacgatcaatatcaccgtttactctccgctgccgggttaagcaaaagctggacgcggacgatgcaaaagcgccgactgagcggcaagatcgaagatttttcccgccggttgtggggaaaataacccccggagtgtaggcctgataagacgctatcagcgtcgcatcaggcatcctgctcaaatgccggatgcggcgtaaacgccttatcctgcctgcaaatgcgaagtttaactccgcttatacagcggcaaccaaatcaccagccgtaaaccgcccagcgggctgtcttctgccttcacccagccacgatgctgctgaatggcggtttcaacaatcgccagccccaaacctgtaccgccagattcacgatcgcgtgcttcatcggtacgatagaacggacggaaaatctgttcgcgatcttccgggctaacgccaggaccatcgtcgtccaccgtaatggtgataccgtctttatctaccgcaaagcccacttcaatcttcgtatgggaataacgcagagcattacgaacaatgttttccagcgcactttccagggcgttcggattgccgtacagcggccacggcccaggcgggaagttaactgtcaagctcttgcccatttgctcggcttcgaacgccgcgttatccagcacttcactccacaactggttggctttgatggtttcgctaaccagcgcgtttttttgctgattacgactcatcaccaacagatcgttgatcatgctgtccagacgttgcgcttcggtttcaatacgctccagttccttgctttcaccgctacgacggcgcagtaacgccgtacccagttgcagacgcgtcagcggggtgcgcagctcgtgagagatatcagaaagcagacgctgctgagaggtcatcatgcgctccagcgcggtgaccatctggttaaaactggcacctgcggcaaggaattcctgtggccccgcttccagttccgggtgctggcgtaagtttccctgggcaacttcatcggcagcgtttttcagcttacgcgccggttttgccagactccaggccaaccacaacagcagcggcgtactgaccaacatggtgacaatcagcagtaatagcgggcggtcaaacagtaagttaatgaaatcggattgagaactgctggccggacgaatcagataaagttggtaattatcttcgccatcacgcacggagaacggaccgaccagttccacgcggccatactttttcttctgcggatgatcggcgttatcggcctgaccaataaagttacgaatgatctgcatttcgctgcgttcagcgccgatcacgcggccttcggtggtcaccaataacaaacgctgtcctggcggtgcccacttatcaatcgcccggaacagacgccgccaccacattaaatcgttgggcggatcgttcgccagctccgcttcgacatgctgctcaatcatcagcccctgacgctgttcgctatccagaagctcggtcatctggcgactatcgagcttgggtaacatcaaaaccaacatcaacaccagcgccagcgtcagccagaagatggcgaagatgcgcgcggttaagctgcctatcatgaagcagaaaccatcagatattagctcaactagcagaaaccatcagatagccgcgaccacgcaaggttttaaaccacgggtgaccatctttacgatccggcagtttacgacgcaggttggaaatgtgcatatcaatagcgcggtcgaaaggcgtcaggcgtttgcccaacacttcctggcttaaatgttcacgggaaaccacctgacccagatgctgtgccagcaaatagagcagggtaaactcagtaccggttaactccagcgtttgcccgtcgaagctggcttcctgacggcctggattcagcactaaggcatcaacttccagtgtcggactaccgttgtcgttgttttgctgttgctcgctccagtggctacggcgcaggatcgcgcgaatacgtgccaccagctcacgatcattaaacggtttcgggagatagtcatctgcgcccagctcaaggccgagaacgcgatcaagttcactgccgcgcgccgtcaacataatgacaggcgtctggtgtgtctggcgaagtgcttttaatgtgtcgataccatttttcttcggcatcattacgtcaagcaaaagtaaatcaatgctgtcgtccagaagatcaagcgcctgttccccatcgtgggcaacaatcacgttgaagccttccatctcgagcagctcctttaatagggaagtcagctctcggtcatcatcaactaacaggattttattcattgtttaaatacctccgaggcagaaattacgtcatcagacgtcgctaatccatgactttacgttgttttacaccccctgacgcatgtttgcagcctgaatcgtaaactctctatcgttgaatcgcgacagaaagattttgggagcaaatgatgcgcatagttaccgctgccgtcatggccagtacgctggcagtcagtagtttaagccacgctgctgaagtcggtagtggcgataactggcatccgggtgaagaacttacgcagcgcagtacgcagagccatatgttcgacggcataagtttaaccgaacatcagcgtcagcagatgcgagatcttatgcaacaggcccggcacgaacagcctcctgttaatgttagcgaactggagacaatgcatcgccttgtcaccgcagaaaattttgatgaaaacgctgtgcgcgcacaggcagaaaaaatggcgaatgagcaaattgctcgtcaggttgagatggcaaaagtccgcaaccaaatgtatcgcctgttaacgccggagcagcaagcggttttaaacgagaaacatcaacaacgaatggagcagttgcgtgacgtgacgcaatggcaaaaaagtagtagcttgaagctattgagtagtagcaacagtcgttcccagtaataaaccctgttttccttgccatagacaccatccctgtcttcccccacatgctgtgggggttttttttatcctcaatttgcctgctgcttaatgcattgcagatgatttgcttccgttatactagcgtcagttgatagcgggagtatttatgaatcaatcttatggacggctggtcagtcgggcggcgattgctgcgacggcgatggctagcctgctattgctgattaaaatttttgcatggtggtataccgggagcgtgagtattctcgccgcgctggtggatagcctggtggatatcggcgcgagcttgacgaatttattggtggtgcgatattccctgcaacctgccgacgataatcacagctttggtcacggtaaagctgagtccctcgcggcgctggcgcaaagtatgtttatctccggtagcgcactattcctgtttttgacgggtattcaacatctgatatctccaacaccgatgacagatccaggcgtcggggttatcgtgacaattgtggcgctaatttgtacgattatccttgtcagctttcagcgttgggtggtgcggcggacgcaaagccaggcggtgcgggctgatatgctacattaccagtctgatgttatgatgaacggcgcaattctgctggcgctggggttgtcctggtacggctggcatcgcgccgatgctctgtttgcattgggaatcggcatctatattttatatagcgcgttacgcatgggatatgaggcggtacagagtttactggatcgcgcattgcctgatgaggaacggcaagaaattattgatatcgtgacttcctggccgggtgttagcggcgctcacgatcttcgcacgcggcagagtgggccgacccgctttattcagattcatttggaaatggaagactctctgcctttggttcaggcacatatggtggcggatcaggtagagcaggctattttacggcgttttccgggaagcgatgtaattatccatcaggacccctgttccgtcgtacccagggagggtaaacggtctatgcttagttaatcagtataaaagagagccagacccgcattttgtgtataaaataccgccatttggcctgacctgaatcaattcagcaggaagtgattgttatactatttgcacattcgttggatcacttcgatgtgcaagaagacttccggcaacagatttcattttgcattccaaagttcagaggtagtcatgattaagaaaatcggtgtgttgacaagcggcggtgatgcgccaggcatgaacgccgcaattcgcggggttgttcgttctgcgctgacagaaggtctggaagtaatgggtatttatgacggctatctgggtctgtatgaagaccgtatggtacagctagaccgttacagcgtgtctgacatgatcaaccgtggcggtacgttcctcggttctgcgcgtttcccggaattccgcgacgagaacatccgcgccgtggctatcgaaaacctgaaaaaacgtggtatcgacgcgctggtggttatcggcggtgacggttcctacatgggtgcaatgcgtctgaccgaaatgggcttcccgtgcatcggtctgccgggcactatcgacaacgacatcaaaggcactgactacactatcggtttcttcactgcgctgagcaccgttgtagaagcgatcgaccgtctgcgtgacacctcttcttctcaccagcgtatttccgtggtggaagtgatgggccgttattgtggagatctgacgttggctgcggccattgccggtggctgtgaattcgttgtggttccggaagttgaattcagccgtgaagacctggtaaacgaaatcaaagcgggtatcgcgaaaggtaaaaaacacgcgatcgtggcgattaccgaacatatgtgtgatgttgacgaactggcgcatttcatcgagaaagaaaccggtcgtgaaacccgcgcaactgtgctgggccacatccagcgcggtggttctccggtgccttacgaccgtattctggcttcccgtatgggcgcttacgctatcgatctgctgctggcaggttacggcggtcgttgtgtaggtatccagaacgaacagctggttcaccacgacatcatcgacgctatcgaaaacatgaagcgtccgttcaaaggtgactggctggactgcgcgaaaaaactgtattaatgatttcggaaaaaggcagattcctttaccctgaaaccgatgacagaagcaaaaatgcctgatgcgcttcgcttatcaggcctacatgaattctgcaatttattgaatttgcaaacttttgtaggccggataaggcgttcgcgccgcatccggcatggacaaagcgcactttgtcagcaatatgaggcggatttcttccgcctttttaatccctcaacatatacccgcaagttatagccaatctttttttattctttaatgtttggttaaccttctggcacgctttgctcatcacaacacaacataagagagtcgggcgatgaacaagtggggcgtagggttaacatttttgctggcggcaaccagcgttatggcaaaggatattcagcttcttaacgttagttatgatccaacgcgcgaattgtacgaacagtacaacaaggcattcagcgcccactggaaacagcaaactggtgataacgtggtgattcgtcagagtcacggtggcagtggtaaacaagcgacgagcgtaatcaacggtattgaagctgatgttgtcacgctggctctggcctatgacgtggacgcaattgcggaacgcgggcggattgataaagagtggatcaaacgtctgccggataactccgcaccgtacacttccaccattgttttcctggtacgtaagggaaatccgaagcagatccatgactggaacgatctgattaaaccgggtgttagcgtgatcacgcctaatccgaaaagctctggtggcgcgcgctggaactacctggcagcctggggctacgcgctgcatcacaacaacaacgatcaggcaaaagcacaggattttgttcgggcactgtataaaaacgtcgaagttctggattctggcgcgcgtggctccactaacacttttgtcgagcgcggaattggcgatgtactgattgcctgggaaaacgaagctctgctggcagcgaatgaactggggaaagataaattcgaaatcgtcacgccgagtgagtctatcctcgcagagccaaccgtgagcgtggtcgataaagtggtcgagaaaaaaggtactaaagaggtggcggaagcctacctgaaatatctctacagcccagaaggtcaggaaattgccgcgaaaaactactaccgtccgcgcgacgctgaggtggcgaaaaagtacgaaaatgcgtttccaaagctgaagttattcaccattgatgaagagttcggcggctggacgaaagcgcaaaaagagcattttgctaacggcggtacgttcgatcagatcagcaaacgctgatttccccaggataattatcaaacccggtggtttctcgcgaccgggttttttatttgtcacgattttgcgttacccttgcatctctttgaggtacagggaaaaaaagatgaaaaaagcgggtcttctttttttggtgatgatagttatcgccgttgtggctgccggtattggttactggaaattaaccggtgaagagagcgatacattacgtaagattgtccttgaggaatgtttgcccaatcagcagcaaaatcaaaatcctagcccatgtgcggaagtcaaacccaatgccggatacgtggttttaaaagatcttaatggcccactgcaatatctgttgatgccaacgtatcgtattaacggtactgaaagtcctttgttgaccgatcctagtacgccgaacttcttttggttggcttggcaggcgcgtgattttatgagcaaaaaatacggccagccggttcccgatcgcgcggtttctttggcgatcaactcccgcaccgggcgtacgcaaaaccattttcatattcatatctcttgtattcgtcctgatgtgcgcaaacagctggataacaatctggcgaacatcagcagccgctggttgccactgccaggtggtttgcgcgggcatgaatacctggcgcgtcgggtaacggaaagcgaactggtacaacgcagcccatttatgatgctggcagaagaagtacctgaggcgcgggaacatatgggacgctacgggctggcgatggtacggcagagtgataacagttttgtattgctggcgacacaacgaaatctactgacgcttaaccgtgctagtgccgaggaaattcaggatcatcagtgtgagattttgcgttaaggcgaagagttaaggaaagtaagtgccggatatgaaatccggcacctgtcagacttaagcctgtttagccgcttctgcagctttaacgattactgcgaaggcgtcagctttcagagaagcaccaccaaccagcgcgccgtcgatatccggctgagcaaacagttctgcagcgttagacgcgtttacagagccgccgtactgaatgatcacttgttcagcgatgttagcgtcaactttagcgatgtggtcacggatgaatttgtgaacagcctgtgcctgagccggagttgcagatttgccagtaccgattgcccatacaggttcgtaagcgataaccgcaccttcgaatgccgcagcaccctgagttttcagtaccgcgtcgatctgacgtgcgcaaacttcttcagttttgcccgcttcattttcagcttcggtttcaccgatgcacagaaccggagtcaggccctgctctttcagcaccgcgaattttttcgcgatcagttcgtcagattctttgtggtaagtacgacgttcagagtgaccgatgatgatgtactgtgcgccgatgtctttcagcatagcagcagaggtttcaccggtgaatgcgccggacaggttcaggtccacgttttgcgcacccagcatgatgtggctgccttcagcttcgcgcttcgccatatcgatatacatttccggtggtgcgattgcaaccgcacagccagcaacacctgccagctctttacgcaggttagaaaccagctcgtgaaccatgtggcggctgccgttcagtttccagttacccatcactaaaggatgtcgcattttaattctccacgcttataagcgaataaaggaagatggccgccccgcagggcagcaggtctgtgaaacagtatagagattcatcggcacaaaggctttgctttttgtcatttattcaaaccttcaaggctttcagatagcgccagcttaatcggttcaacagcgaaggtcagccccttttcgccgttgtccgcgacaacataacgcagtgcaccttctgtctcggtgtaataacgtttgtttttccccgccgttagtaggctctgcagttttttctggctttgtgttttggtcattaatggggtgagtgtgcggatcaccgctgccatgtattcctgagctttcgctttcgcggctttttgctctggcccctggatgggtagccaggtcatttgaatgcttttgatttttaaggtaccgcgctccagcgctgtagaagcatacaagttctcattaattttacttgcagcacgagtgagattggctttgtcgggactgctgtcgatggcacgaaattcgttcagtggcaggctgggattctggctgttaaagtcttctcgaaactggctgatggagagatcgaaagtaggggctccagccagcagataaggcgcggtcgttgccgtatctggtgtttgtgcatgcgcctctgttgtaacggttaatgcagaacataagagaaaaaacagcgtacaccctggcttcattgacagtaccttttgttatgactggctccgattaaaacgatatctgtcgcccttgtcaaaagggtagaatcctggaaaagacaaccatcaaggaacttacatgaccatacagcaatggttattcagttttaaagggcgtattggacgccgtgatttctggatttggataggcctgtggttcgcaggcatgctggtgcttttcagtctggcgggtaagaatctactcgatattcagaccgcggcgttttgccttgtgtgcttgctctggccaacagcggcagtaactgttaagcgcttgcatgatcgcgggcgttccggcgcatgggcatttctgatgattgtggcgtggatgctgctggcgggtaactgggcgattttaccgggtgtctggcaatgggcggtggggcgttttgtcccgacgttgattctggtgatgatgcttatcgatcttggtgcgtttgttggcacacaaggcgaaaataaatatggtaaagatactcaggatgtgaagtataaagccgacaataaaagtagtaattaacctttaatatatctcttactgctatttttttccgggattgttatttccacgatgcaaatgacaatacccggaaaatccttctgaactcttcaccttaagcaatatcaaaaaaaatggtaatccataagatcattacttgtttgttcttcccttaacggcgcattattcttaagtcgtaatcgacagagaggcgaatatacagaggtgccctatgaaagatgtcgtagataaatgcagtactaaaggatgtgcgattgatatcggtacggtgattgataacgacaactgtaccagtaagtttagccgcttttttgccacccgcgaagaagcagagtcttttatgaccaaactgaaagagcttgccgccgctacatcctctgcagatgaaggggccagcgtggcctataagattaaggatctggaggggcaagttgagcttgatgcggccttcactttcagttgccaggccgagatgattatttttgagttaagtctgcgtagcttagcttgatggagttgctttagaaggagttaaacatggcttataaacacattggcgtggcaatttccgggaatgaagaagatgccttactggtgaataaagccctggagctcgccagacataatgacgctcacctgacgttaattcatattgatgatggcttaagcgagttgtatccgggtatctacttccctgcaacagaagatattcttcaattgttgaagaataagagcgataacaagctgtataaactgacgaaaaatattcaatggccgaagacaaaactgcgtattgaacgcggagaaatgccggaaacactgctggaaattatgcaaaaagagcagtgcgacctccttgtctgtggtcatcatcacagttttatcaaccgtttgatgccggcatatcgcgggatgatcaataagatgagtgcggatttgctcatcgtgccgtttatcgataagtaaccgcttaccagtaatgctccgctgtcatatggcccggtcggcgacgtaaatgtttcgtcatctgccgggtctctttcagcaactgttgtgtatcgcgcaccatctgtggattgccgcacagcatcacatggctggtttctttattcatcggcaggccaatcgtgctttccagttccccactttcaattaatgccggtatccgtccggtgaggctccccgctgccgtttcccgactgaccaccgtctgaatgcgcagttttccttcgtagcgtttttccagttcctgcatcagtggcaaatagcttaagtcggcggcataacgtgcggcgtgcaccaggaccagatttttgaagcgatctaaatctttacctagttgcagaatgcttaaataagggccaatcgctgtaccggttgccagcatccatagcgtttcgcagtgcggcacttcatcgagcacaaagaatcctgccgcttcgctaaccacctgcacttcatcgcctggtttcagtgccgccagtcgtgggcttaatttgccatcggggacggtgaccaggtaaaactccagatcgggattatcggggctgtttacataggagtaggcgcgctggacgcgttcgccgtcgatttcaaggccaagcttggtaaattgcccggcggtaaacggaagcacgggggcgtgaacggtgagactaaacagggcgtcggtccagttctgcactttagtgactttgcctgttacccaatcagccatgtttttctcctgttttgattgacttgccttatcttcgttctccgaacaaaaaaattccagtcccgaaggactggaaggctcaatcgatcaaatcaatcagaggatgtgcacctgcatttccgggtctttgcgatccagatagtggatggactgaatgcggcgaatggtgcgactcttgccgcggatcagcagcgtttcggtagtcgcgatattgcctttgcggctaatgccttccagcagatcgcctttggtaataccggtggcagagaagatgacgttatcgctgcgcgccatatcgcccaggcgcaatactttaccggcttcgatgcccatcgctttgcagcgtgccagctcctgctcgccaatgcgacgattctcttcgttgtcgcctttgacgtcatgacgcgccagcagacgaccgttcatgtcgccatctaatgcgcggatcaccgccgcagaaactacgccttccggcgcgccaccaataccgtacagcacgtcaacttcgctgtctggcatacaggtgagaatactggccgcaacgtcgccgtccggaatagcaaatacgcgtacgccgagttgctgcatttcagcgataacggcatcgtggcgtggtttagccagaatcgttaccgtcagttcgctcaacggtttgccgagcgccgccgctacattgcgcaggttatccgccagcggcaggttcagatcaatggtgcctttggctcccggcccgacaatcagcttctccatatacatatccggcgcattgaggaagcagcctttatcgcctactgccagcaccgccagcgcgttagcctggcccatcgccgtcatgcgcgtgccttcaatcggatcaacagcaatatctaccgcgtcgccgcgaccagtaccgactttttcaccaatgtagagcatcggtgcttcgtcgatttcaccttcaccaatgacgatggtgccgtcaatgttgacctggttgagcataatacgcatggcgtttaccgccgcgccgtccgcggtgtttttatcgccgcgtcctaaccatttgtagccagccagcgccgcactttcggtgacgcgggaaaattcgatggcaagttctcgtctcatagcaaactctaagcagtaaggaatggcgcgaagtgtagcacaggggaagggagggattattgatgtgtgcggggttgcccccgcacgtttcgggactaccggatgcggcataaacgcttcattcggcatttacattattcgtcgtgttcttcccacgccatcgcgcgtttaaccgcttttttccagcctgcgtaacggtaattacgctcagtggtttcgatgcctggacggaactcgcgctcaatcaccgctttctcttgcagctcgtcgaggttctgccagaagccaaccgccaggcctgcgagataggccgcacccaatgcggtgacttcgcgcacttccgggcgctcaacgcgggtgccgagaatatcggactggaactgcatcaggaaattgtttgctactgcgccaccatccacgcgcagggcgtgcagacggataccagagtcggcctgcatcgcttccagcacgtcacgcgtctgataagcaatagactccagcgtcgcgcgtataatgtggttagcgttcaccccacgagtcagaccgaaaatcgccccgcgcgcatacgggtcccagtacggcgcacccagcccggtaaatgccggaaccacatacacaccattggtgttttgcactttggtggcgaaatattcggaatcgtaggcgtcgttaatcaacttcatttcatcgcgcagccactgaatggatgcgcctgccataaacaccgcaccttccaacgcatagttcacttcgccagtcgggccgcaggcgatggtggtcagcaggccgttttcacttttcaccgctttctcgccagtgttcatcagcataaagcagccagtgccataggtgttcttcgccatcccttctttcacgcacaactgaccaaacagcgcggcctgctggtcaccggcgatcccggagattggaatacgcgtgccgcctttgccgccaatgttagtctgaccgtatacttcggaagaacgacgcacttctggcagcatctcgcgcggaatatccagcacttccagcattttgtcgtcccagtccagggtatggatgttgaacaacatggtacgagaggcgttggtgtaatcggtcacatggacacggccctgagtcattttccagataagccacgtatcaaccgtaccaaacagcaattcaccacgacgtgcacgctcgcgagagccttccacatggtcgaggatccacttcactttggtgccagaaaagtacgggtcaatcaccagaccggtattgctgcggatataatcttctaaaccgtcacgttttaaatgctcgcagatttctgcggtacgacggcactgccagacaatggcgttatagataggcttgccggtttctttttcccagacaatagtggtttcacgctggttcgtaataccgatagctgcaatttgatcggaactgatatcggctttcgccagcacttctaccagcgtggagctttgggtggcccagatttccattgggtcgtgttctacccaacctggttttgggtagatttgctcaaattcgcgctggctcacgctaatgatattggcatcgtgatccattacgaccgcgcgggagctggtggtgccctggtcgagcgcaacgatatattttttttcagtcatgtttaattgtcccgtagtcatattacaggctagctttttgttcactaggagttgtggtttccttttcttccacaacacagatatcgcaaggcaaatggcgaccaatcagtttgcggtaggcaaatgcacctacaatcgcgccaacgatagggccgaaaagcggcaccaggaagtaaggaatgtctctgccgccggtaaaggcgacattgccccagcccgccagccaggcaaagactttcggaccgaagtcacgcgctgggttcatggcaaaacctgtcaatgggcccatagatgcgccaatgaccgcaatcagtagaccaatcagcaagggagccaaagggccgcgtggtacaccgttgccatcgtccgttaacgccaggatcagccccatcagaatagcggtaatcaccatctcaactgcgaaagcctgcacaaaattgatatgaggattagggtaagtagagaaagtgccagccagatcaacactttcaacgctgccgcgaacaatgtgatgagtctgctcgaagtcgaaaaataaattgtagtaaagcccgtaaactaaagccgcagcacagaaagcgccggcaacttgactaacgataaaaggaataactttgcgcttgtcgaaacaggcaaacagccacaatgcaatggtaacagcgggattaagatgcgcgccggaaacccctgcggtcaggtagatggccattgccacccccagtccccaaatgacactgatttcccactgaccaaaagacgcaccagcgacttttagtgctgcaacgcaacccacaccgaagaaaatcaacaacccggtaccgaggaattcagcaatgcactggcctttcaaggtacttgtttgactcataatcggatcctgaagagttaatgtttgttgtatgcgtgaaagtcacggacctccacgatgcttgtaggcatgctgtaaacttatcgttaacgagcaaaaacgagaaatatcgaacttaaaatgtgtgtgcctcgtcataaaatgagcgttatcgcgccatttattccatctgattgtacatgatgcatgtttgttagatcattcgcgcaacaaatttattaacattttcgattgatgtggattatgtcaccaggagaaggatgaaaagtgtggcaaaccgtaatctgcaaggcgtgccgctggacagcgatggcgcggcttcatacaatcggagctaactaaagtgcgctcgtatttattaaggcgtcaccggtaatcgggacgaggatttttatccatcaacgccttgcaattcaggagaggtatgacaatgagtttagaagtgtttgagaaactggaagcaaaagtacagcaggcgattgataccatcactctgttgcagatggaaatcgaagagctgaaagaaaaaaacaacagtctgagccaggaagttcaaaatgcccagcatcagcgcgaagagctggagcgtgagaacaaccatctgaaagaacagcagaacggctggcaggaacgtctgcaggccctgctgggtcgcatggaagaggtctgattacgcttcatcttccgcgtaatttctttactgtgtaggccaacaggtaacgcagaaaaaaggcaccttgcggtgcctttcttatcattcaatatccagcggatcttcactaagaataatcccggtattgtcggcataaagatggtcgccggagaagaaggtgacaccgccaaaattgacgcggacatcgctttcgccaatgccttcgccagcggcaccaaccggaattgccgccatcgcctggatgccgatatccaactcttccaggtcatctacctgacgcaccgcgccgtaaatgaccagaccttcccattcattttgtactgccagacgcgccagttcagcatcgaccagtgcgcgacgaacagaaccaccgccatcgacgacaagaacacgaccacggccattctgttcgagcagatcgtacagcaacccgttgtcctcgaaacattttaccgtgattatttgtccgccaaagctcgcccgtccgccaaagttggagaacagcggttccacgacgttaacatcttcttgatagatgtcacaaagctcggaagtatcgtatttcataggcttaacattcagttgctgcgagaattttcagtatatcgcgctatgtgggctgttggcaaaatcatcaattgttaattgatatttgtcagttatgctgcccactggcttaggaatatccctaaaacaaacagcaggttagtcagtaacgctcccttgacagtacgttccagcattggtcgcatcgccaccgggtccatttcccgcatcacataacgggcttgcttcaccagtaatggtgccgccagcaggaacagccagccccacaggctatgcaggctaaagagattaaacagcgccagacacaccaggctgcccatcagcaggcaggcatgataacgacgcgcgttcacttcacctaagcgcaccaccagcgtgtttttgccattttcgcggtcgctattgatatcacgcaggttattaatattcagtactgccgttgccagcaggccgcatgcggtcgccggaaggatcagtgccggaatcaatgtatgagcctgtaaataccagctccccatgacactcaaccagccaaagaaaaccagtacggaaatatcacccagaccgatataaccataaggacgattgcccacggtgtaggtgatagcggcaatgatgctcaacccgccaagaatcaggaaaccgacaaaatcggccagcgtatggcatgccactgcaaccagtgccagcccggagagacagatgagcacgacggtaataatgagcgcccgtttcatctcttgctgggtaatgacccctttttgcatgccgcgtagcggcccaatgcggtcaggtttatcgctgccttttaccgcatcgccgtaatcattggcgaggttagaaaggatctgtaatagcccggcggtaattagtgccagcagggcgaccagcggatcgaagtgaccttgccaccatgccagcgctgtcccgacgataattgcagcaaaggcgagggggagggttttaggtcgtaaactttccagccacgcctgagttcggctaatttgttgttcagtcataatacgcgccaataaaaatggggcctttcagccccatcaaacaatgatgaaaatgattgaacgcgattataggataaaacggctcagatcttcatctgccaccaacgcatccagatgtttgctcacataatctgcgtcaatagtgatattttgaccgcttaaatcgctggcgtcgtaggaaatctcttccattaaacgctccagaacagtgtgtaaacgacgagcaccgatgttttcggtagattcgttcacctgccatgccgcttccgcgatgcgtttaataccggagtcggtaaactcgatatttacgccttcagtcgccatcagtgctttgtactgcacggtgatagaggcattcggctcggtcagaatacgctcgaagtcgctggtggtcagcgcctgcagttcaacgcggattggcagacgaccttgcagttccgggatcaggtcagacggtttcgcaatctggaacgcgccagaagcgataaacagaatgtggtcagttttgaccatcccgtgtttggtggaaacggtgcaaccttctaccagcggcagcaggtcacgctgaacgccttcacgagaaacatccggaccggaagactcgccgcgcttacagattttgtcgatttcgtcgataaacacgatcccgtgctgctcaacagcgtcgatagcgtcttgcttcagctcttccgggttcaccagtttcgccgcttcttcttcaatcagcagcttcatggcgtctttgattttcagcttacgcgctttttgcttctggccgcccaggttctggaacatggactgcagctggctggtcatctcttccatgcccggaggagccataatttcaacgcccatcggtgctgcggcaagatcgatctcgatttctttgtcatcaagctggccttcacgcagttttttgcggaatgcctgacgagcagcggacggttcctgctgctgttcggtctgtccccagttgtttttagcaggtgggatcagcacgtcgagaatacgttcttctgccagttcttcagcgcgataacggtttttctcgatagcctggacgcgtaccattttcacggcggcatcggtcagatcgcgaataatagaatccacttccttaccgacgtagcccacttcggtgaatttggtcgcttcaactttgatgaacggcgcattcgccagcttagccagacgacgggcgatttcagttttaccgacaccggtcgggccgatcatcaggatatttttcggggtcacttcatggcgcagctcttcgttgagctgcatgcgacgccagcggttacgcagagcaatcgccacagaacgcttggcgttgtcctggccgatgatgtgcttatccagttcgctgacgatttcgcgtggggtcatttcagacatgggagatccttacgctttgtagcttaattcttcgatggtgtggaaatggttggtatagatgcaaatgtcgcctgcaatatccaacgccttttcagcaatttcacgggcgctaagttcagtgttttctaacagcgcgcgcgccgcagcctgggcgtaagggccgccggagccgatagcaataagatcgttttctggctgcaccacgtcaccgttaccggtgatgataaggcttgcagtttcatccgcgactgccagcagtgcttcaagtttgcgcagcatgcgatcggtacgccagtcttttgccagctcaacggcggctttgaccagatggccctgatgcatttccagtttacgttcaaacagttcgaacagcgtaaaagcatccgcagtaccgcccgcaaagcccgcgatgactttgtcgttgtacagacggcggacctttttcacgttgcctttcattacggtattgcccaacgtggcctgaccatcaccagcgatgaccacatggccgttacggcgtacgcttactatagttgtcacgagctgaccccttggttacgaatacagagtacaaaccccgtacaaaagtacggggcataatgcaattatagatgggggggattttgagggtttcaacccccggcggcgagccgaatgcagtttgtatgacccgccatcttcaaccgattgagggtgctgtctgcgttctctttgcctttcaccgggccaatgaccacacgattccagccattgttggtggtgattttgctgtcaaagccttcgaacgccagctgagcacgtaccgtctctgcctgttccgcgcctctgaagctaccgcactgcaccatccagcggcgttcgtcttttttctccgccgtcggttttggcgcgtcagcggcacgagcaactggcgcagcttgctgcggcttgctctgcgcagtcgtgtgcgcaggagtttgcagcagatcctggtacggctgctgagaagaagccggtttagactggcgcggttgcgcctgtaccggtgcggcttggctcgtacgcgtctgctgctgccagctttgttcagtcgtacggctctgctgagccaggcgttgctgttccgctaattgctgcgcctgacgttggcgctgtagcgtttgctgacgctgttccggcgtctgttcattccacggaacttcaaccagctgcgttggctgctggcgcatatcagcctgcatttgttcaagaagctgacgttgttctggtgtcagttgctccggcgttttcacttcaccaccggcagaaggttctgtgggcgcacgcactcccggctggcgactttccagctctttaatgtagcgccagcgttcttctggttttggtggtagtccgtttccggtcactttctggctttgcagcgtctcggactcttctttcttgtgatgcgtaatgaagtacagaccaccgataaaggtcacaagaacggcggcagcaatagcgaccatagcgggagaaaccgcaggcagatttcgttgctttttccgactggtgctcttttttcgccggctaggtgccggttggctgcggcgtacataatctcgttgtgccactatcgtttcgctgtatttattcgttcgtcagcccgccatgttacttaagcggcgggcctttgaccagtcacggcagtcttaaaggtttactttaaggtaacgcgcgtgtacttccccggatgataagttcgcagtccattaaacgagagccactgccaacgtgttgcccctgcatttgatcaagcaataacagcatagcttcccgaccgatttcgtaacgcggctgcgcgatggttgtcagcggcggatcacaaaattgcgtcaggtcgatgttatcaaaaccgattatggaaaggtcttccgggactttcagcccctggcgttttgcctgagaaagtgcgccgagcgccatcacatcgctatggcagaagacagcagtaggcggttgtggaagatcaagcagctgctgcatcgctttgcttccggcttcgaaggtgaagtcgccacgggcgatgtattgcggatcaaccataatgccgcagcgacgcagcgcctgaacatagccttgcaggcggtagtgacacagcggcatctcttcgggaccggctatacagccaatccgtttatgcccttgctcatataaataatttactgcatcaaatgcggcggtcagattgtcgatatgaactgtaggcagctccagctccggtgcaaattcgttcgccatcaccatcggcggcagattacgctgttcctcaatgctggcatcaaacggcagcctactacccagcaacaacatgccatcaatttgcttggtgatgatcaaatcgataaaggttttttcctgctgattttgatgcgcacagtcgccaatcagcaccagatatccgtgatttgccgccgtaacttcgataccgcgaataatttcgctaaagaagggatcgcagatatccgggacaatcaccagaatggtgcgggattcattacgcttgacgttgcgccccataggctgcggtaaataacccacttcccgggccgctttttcaacccgattacgggtggcctgggagactttatcgggattcattaatgctcgggagacggtcgctgtagagacttttgccttgagggcaacgtctttcatggtcgcggcagtttcctgcttcttcgctttcacactcactcctcgcctggcacgtcaggcgtactacatccatgtttacttcacatcggcaacatttttagcagatagcgcgtgaaaacggttacagaattttcatgaaaagtgtgatgaatattgaatttttcgatccgcctcgcatcgtgagcggtttaaccctcaatcggatcaacatccagcacccatttcaccttacgggaatccggtattgtattgatgagcgccagcgtaccgttaatgatgtgttgcaagcgcacgcgggaagggtgctgcaacaatatctgccagcgccagcgaccgccacgtttaggtgccagagccggaaccggaccgagaacccacagtttctcgtctgccagtgggctggagaggatcagattacgcagttgttgcaggaacaatggcgcgtgctgattgttatgatcttccgcacgcacaatcacatggctggtccacggcggtagctgcatcattcgccgctcagccagcgcctgttcggcaaaggcgtcgtagcctttatagagcaacgtttgcaacagaggatgttccggatggtgcgtttgcagcaccacttcgccctgtttacccgcacgcccggcacgaccggcgacctgggtgtaaagctgagcgaaacgctctgcgctgcgaaaatcggcagaaaacagcgcgccgtccacgtccagtaatgcaaccagcgtcacatccgggaaatggtgacctttcgccagcatttgtgtaccaatcaaaatccgcgcgccgccgcgatgtacttctgccagttgctgttccagcgcccctttgcggctggtggtatcgcggtcgatacgagaaatgggcacgccggggaacaacggcgcgagcgtctgttcaagctgttcggtgcccagccccacggggaccaggtgcgtggaaccgcaggaagggcactggcgcggcaccggacgctgactgtcacagtggtggcagcgcagatggtgctgcgcctgatgcagcgtgtagtagtgatcgcaacgtgggcattcggcaatccagccacagtcgtggcacagcagtgcaggcgcaaagccacggcggttaagaaagagaatgacctggttatcagcctgtaaatgctggcgcatacgagtgattaacgccggagccagacctgcctgcaccttctgaccttttaaatccagcacatgttgaattgccggacgcgcattccctgcccgacgggtcaggcgcagcaggcggtattttttctgctggacgttgcataacgtttccagcgcgggcgttgcggagccaagaataatcgggatttgctcgctgtgcgcacgatacaccgccaggtcgcgggcatgatagcgccagccttcctgctgcttgtaggagctgtcgtgctcttcatcaatgacaatcacgccgagatttttaaacggcgtaaacagcgcggagcgggtgccgatcacaatcgccgcctcaccatttttcgctttcagccacgcgctaagacgctcgctgtcgttcaggccggaatgcagaacttccacgggggcattaaaacgttcacgaaaacgggcgatagtttgcggtgtcaggccgatttccggcaccatcaccagcgcctgtttgccctgagcgagcacgttttccagtacgctgagataaacctccgttttaccggaaccggtaacgcccgccagcagccaggcagaaaaagtatctgccgcgctatgaattgcgccaacggcggtggcctgttcggtattcaatcgcaaccgctcaccagaaacggcatagttcgttcgccagtcgctaaactctggtgtttcacttgctaaatcacacagaccttttttgcgtagcgcctgcaacgcggcatcattaaattcgagcgtggcgacctggtcgcgccagattttgccttgccgtaacgccgccagcgcctgttgttgcttgggggagcgtttcaggctgttcagatccaccgcctggccttgttcagtggcaaaccagtaccacatcggcgcgttcgccgcaggccgcccctggcgtagtaaaatcggcaaggcatgaaacagcacatcgccaatcggatgatgatagtaatctgccgcccatagcagcaatcgccagacggagtgagtaaacaccggctcactatccagcacttcgactaccgcttttagctcattgagcggcagttcgctggcatcgctaacacttaccacaatcccgatgcgctcctgctgtttgccaaacggcacgcgcacgcgacacccagctttaaccgtcatgccttctggcagcagatagtcaaaggtacgaggaagcggaacgggcaaggcaacgtgggcaacgggcatagcatcatcctgacttgaaattcggtgggttagtatacacattgccgtagaagagtgcggatcagtttgcatacgctggttaatttctgtatgatttcgcgccttcgtacgaaatgatcgtattgaagctatacttttaacatcgcgtggtgtctggcgttagggctggaagagcgacgcggccttaaaccgaggttttcccatgaaaaaagatattcacccgaaatacgaagaaattactgctagctgctcttgcggtaacgtaatgaaaatccgctccaccgttggtcatgacctgaacctcgacgtgtgcagcaagtgccacccgttcttcactggcaaacagcgtgatgttgctaccggtggccgtgttgaccgcttcaacaagcgtttcaacatcccgggcagcaaataagaccggatttccgaaaaaagcgccgcacggcgctttttttgtgcctgaattttggtcgtattaccagctaaacagcggccattctttggcgaccgtggtgagttgtggcgcatcgaaaacggcttgtgggctgaccaccgtttcctcaagcggaatattcttgccgtaacgttctttgagctttgcctgaacttgtgggctgctcaggtcgaactctttcaacttctgctgctcgcccacgcgcattcccagcgcgttctggtaaaccttccacaccacttcgctacagtactggcgatcgtcgctccaactgaagctgaaatcatacggtttaccgagataacgttttgccgtttgcgccagtttttgctgttgttcaacactcagtccgccttcaacgcggcgaacaacgtatttgcccttttcaccatgggcgatccactgcttgagcggggtgtatttcaccgggccgactgcttcaaaaacgtagggctttttgttgcgtatcaccagcataccggtgtggctataatcggtatgggtcgccagttggatcgctttactttggctactgcgagagatctgaaagatgatgtcgccggtttgtggctgccaggcaaaggcaggtacagaaaccagcaggctgaggatcagcagcctgtttttcatagttaaacgtccatgtataaaaagcggtgggtcgcagacaacgtgctcgttgtttatgccggatgcggcgtgaacgccttatccggcctacaagttcgtgcaaattcaataaattgcaatatgacgtaggcctgataagcgtagcgcatcaggcgattccactccgcgccgctcttttttgctttagtattcccacgtctccgggttaatccccatctcacgcatgatctcttttgccgcttccgggatttcgtcgctgcgctctttacgcagatcggcatcatccggcaaaggttgcccggtaaaggcatgcagaaacgcttcgcacagcagctcgctgttggtagcgtgacgcaggttgttcacctgacgacgcgtgcgttcatcggtgaggatttttaacaccttaagaggaatggaaaccgtaatctttttgacttgttcactcttcttgccgtgctcagcgtatgggctgatatattcgccgctccattcagccatgagatacttaatcctcttcgtcaataaattgagaccagaccacacagttgatgtgggtactgaccgtaaacccgcatagtttaccgtacaggcgttaccgtgacatcgtgtaatgcacctgtcggcgtgataatgcatataattttaacggctatttgggatttgctcaatctatacgcaaagaagtttagatgtccagatgtattgacgtccattaacacaatgtttactctggtgcctgacatttcaccgacaaagcccagggaacttcatcacatgacgcgtaaacaggccaccatcgcagtgcgtagcgggttaaatgacgacgaacagtatggttgcgttgtcccaccgatccatctttccagcacctataactttaccggatttaatgaaccgcgcgcgcatgattacagccgtcgcggcaacccaacgcgcgatgtggttcagcgtgcgctggcagaactggaaggtggtgctggtgcagtacttactaataccggcatgtccgcgattcacctggtaacgaccgtctttttgaaacctggcgatctgctggttgcgccgcacgactgctacggcggtagctatcgcctgttcgacagtctggcgaaacgcggttgctatcgcgtgttgtttgttgatcaaggcgatgaacaggcattacgggcagcgctggcagaaaaacccaaactggtactggtagaaagcccaagtaatccattgttacgcgtcgtggatattgcgaaaatctgccatctggcaagggaagtcggggcggtgagcgtggtggataacaccttcttaagcccggcattacaaaatccgctggcattaggtgccgatctggtgttgcatagttgcacgaaatatctgaacggtcacagtgacgtagtggccggcgtggtgattgctaaagacccggacgttgtcactgaactggcctggtgggcaaacaatattggcgtgacgggcggcgcgtttgacagctatctgctgctacgtgggttgcgaacgctggtgccgcgtatggagctggcgcagcgcaacgcgcaggcgattgtgaaatacctgcaaacccagccgttggtgaaaaaactgtatcacccgagcttgccggaaaatcaggggcatgaaattgccgcgcgccagcaaaaaggctttggcgcaatgttgagttttgaactggatggcgatgagcagacgctgcgtcgtttcctgggcgggctgagcttgtttacgctggcggaaagtttagggggagtggaaagtttaatctctcacgccgcaaccatgacacatgcaggcatggcaccagaagcgcgtgctgccgccgggatctccgagacgctgctgcgtatctccaccggtattgaagatggcgaagatttaattgccgacctggaaaatggcttccgggctgcaaacaaggggtaaaaatgagtgtgattgcgcaggcaggggcgaaaggtcgtcagctgcataaatttggtggcagtagtctggctgatgtgaagtgttatttgcgtgtcgcgggcattatggcggagtactctcagcctgacgatatgatggtggtttccgccgccggtagcaccactaaccagttgattaactggttgaaactaagccagaccgatcgtctctctgcgcatcaggttcaacaaacgctgcgtcgctatcagtgcgatctgattagcggtctgctacccgctgaagaagccgatagcctcattagcgcttttgtcagcgaccttgagcgcctggcggcgctgctcgacagcggtattaacgacgcagtgtatgcggaagtggtgggccacggggaagtatggagcgcacgtctgatgtctgcggtacttaatcaacaagggctgccagcggcctggcttgatgcccgcgagtttttacgcgctgaacgcgccgcacaaccgcaggttgatgaagggctttcttacccgttgctgcaacagctgctggtgcaacatccgggcaaacgtctggtggtgaccggatttatcagccgcaacaacgccggtgaaacggtgctgctggggcgtaacggttccgactattccgcgacacaaatcggtgcgctggcgggtgtttctcgcgtaaccatctggagcgacgtcgccggggtatacagtgccgacccgcgtaaagtgaaagatgcctgcctgctgccgttgctgcgtctggatgaggccagcgaactggcgcgcctggcggctcccgttcttcacgcccgtactttacagccggtttctggcagcgaaatcgacctgcaactgcgctgtagctacacgccggatcaaggttccacgcgcattgaacgcgtgctggcctccggtactggtgcgcgtattgtcaccagccacgatgatgtctgtttgattgagtttcaggtgcccgccagtcaggatttcaaactggcgcataaagagatcgaccaaatcctgaaacgcgcgcaggtacgcccgctggcggttggcgtacataacgatcgccagttgctgcaattttgctacaccagtgaagtggccgacagtgcgctgaaaatcctcgacgaagcgggattacctggcgaactgcgcctgcgtcaggggctggcgctggtggcgatggtcggtgcaggcgtcacccgtaacccgctgcattgccaccgcttctggcagcaactgaaaggccagccggtcgaatttacctggcagtccgatgacggcatcagcctggtggcagtactgcgcaccggcccgaccgaaagcctgattcaggggctgcatcagtccgtcttccgcgcagaaaaacgcatcggcctggtattgttcggtaagggcaatatcggttcccgttggctggaactgttcgcccgtgagcagagcacgcttagcgcacgtaccggctttgagtttgtgctggcaggtgtggtggacagccgccgcagcctgttgagctatgacgggctggacgccagccgcgcgttagccttcttcaacgatgaagcggttgagcaggatgaagagagcttgttcctgtggatgcgcgcccatccgtatgatgatttagtggtgctggacgttaccgccagccagcagcttgctgatcagtatcttgatttcgccagccacggtttccacgttatcagcgccaacaaactggcgggagccagcgacagcaataaatatcgccagatccacgacgccttcgaaaaaaccgggcgtcactggctgtacaatgccaccgtcggtgcgggcttgccgatcaaccacaccgtgcgcgatctgatcgacagcggcgatactattttgagcatcagcgggatcttctccggcacgctctcctggctgttcctgcaattcgacggtagcgtgccgtttaccgagctggtggatcaggcgtggcagcagggcttaaccgaacctgacccgcgtgacgatctctctggcaaagacgtgatgcgcaagctggtgattctggcgcgtgaagcaggttacaacatcgaaccggatcaggtacgtgtggaaagcctggtgcctgctcattgcgaaggcggcagcatcgaccatttctttgaaaatggcgatgaactgaacgagcagatggtgcaacggctggaagcggcccgcgaaatggggctggtgctgcgctacgtggcgcgtttcgatgccaacggtaaagcgcgtgtaggcgtggaagcggtgcgtgaagatcatccgttggcaagtctgctgccgtgcgataacgtctttgccatcgaaagccgctggtatcgcgataaccctctggtgatccgcggacctggcgctgggcgcgacgtcaccgccggggcgattcagagcgatatcaaccggctggcacagttgttgtaatttcagaaatttaataatgcccggtactcatgttttcgggtttatggtttctaatgaaatatattgaattatcataggattaggccggattaagcgtttacgacgaatccggcaagaagcaataagtacatggttagtttatatttgcagtccggtttgctttgcataccggattttctttttcttaccatcctgaagttttttcatcttccctgatttttcctcaccatcattggtcatttttcggttgacgcccttcggcttttccttcatctttacatctggacgtctaaacggatagatgtgcacaacacaacatataactacaagcgattgatgaggtaaggtatgagcttttttcacgccagccagcgggatgccctgaatcagagcctggcagaagtccaggggcagattaacgttagcttcgagtttttcccgccgcgtaccagtgaaatggagcagaccctgtggaactccatcgatcgccttagcagcctgaaaccgaagtttgtaagcgtgacctatggcgcgaactccggcgagcgcgaccgtacgcacagcattattaaaggcattaaagatcgcactggtctggaagcggcaccgcatcttacttgcattgatgcgacgcccgacgagctgcgcaccattgcacgcgactactggaataacggtattcgtcatatcgtggcgctgcgtggcgatctgccgccgggaagtggtaagccagaaatgtatgcttctgacctggtgacgctgttaaaagaagtggcagatttcgatatctccgtggcggcgtatccggaagttcacccggaagcaaaaagcgctcaggcggatttgcttaatctgaaacgcaaagtggatgccggagccaaccgcgcgattactcagttcttcttcgatgtcgaaagctacctgcgttttcgtgaccgctgtgtaagcgcgggcattgatgtggaaattattccgggaattttgccggtatctaactttaaacaggcgaagaaatttgccgatatgaccaacgtgcgtattccggcgtggatggcgcaaatgttcgacggtctggatgatgatgccgaaacccgcaaactggttggcgcgaatattgccatggatatggtgaagattttaagccgtgaaggagtgaaagatttccacttctatacgcttaaccgtgctgaaatgagttacgcgatttgccatacgctgggggttcgacctggtttataaatagtgtggcttttgtgaaaatcacacagtgatcacaaattttaaacagagcacaaaatgctgcctcgaaatgagggcgggaaaataaggttatcagccttgttttctccctcattacttgaaggatatgaagctaaaacccttttttataaagcatttgtccgaattcggacataatcaaaaaagcttaattaagatcaatttgatctacatctctttaaccaacaatatgtaagatctcaactatcgcatccgtggattaattcaattataacttctctctaacgctgtgtatcgtaacggtaacactgtagaggggagcacattgatgagcacgagtgacgatatccataacaccacagccactggcaaatgcccgttccatcagggcggtcacgaccagagtgcgggggcgggcacaaccactcgcgactggtggccaaatcaacttcgtgttgacctgttaaaccaacattctaatcgttctaacccactgggtgaggactttgactaccgcaaagaattcagcaaattagattactacggcctgaaaaaagatctgaaagccctgttgacagaatctcaaccgtggtggccagccgactggggcagttacgccggtctgtttattcgtatggcctggcacggcgcggggacttaccgtagtatcgatggacgcggtggcgcgggtcgtggtcagcaacgttttgcaccgctgaactcctggccggataacgtaagcctcgataaagcgcgtcgcctgttgtggccaatcaaacagaaatatggtcagaaaatctcctgggccgacctgtttatcctcgcgggtaacgtggcgctagaaaactccggcttccgtaccttcggttttggtgccggtcgtgaagacgtctgggaaccggatctggatgttaactggggtgatgaaaaagcctggctgactcaccgtcatccggaagcgctggcgaaagcaccgctgggtgcaaccgagatgggtctgatttacgttaacccggaaggcccggatcacagcggcgaaccgctttctgcggcagcagctatccgcgcgaccttcggcaacatgggcatgaacgacgaagaaaccgtggcgctgattgcgggtggtcatacgctgggtaaaacccacggtgccggtccgacaagtaatgtaggtcctgatccagaagctgcaccgattgaagaacaaggtttaggttgggcgagcacttacggcagcggcgttggcgcagatgccattacctctggtctggaagtagtctggacccagacgccgacccagtggagcaactatttcttcgagaacctgttcaagtatgagtgggtacagacccgcagcccggctggcgcaatccagttcgaagcggtagacgcaccggaaattatcccggatccgtttgatccgagcaagaaacgtaaaccgacaatgctggtgaccgacctgacgctgcgttttgatcctgagttcgagaagatctctcgtcgtttcctcaacgatccgcaggcgttcaacgaagcctttgcccgtgcctggttcaaactgacgcacagggatatggggccgaaatctcgctacatcgggccggaagtgccgaaagaagatctgatctggcaagatccgctgccgcagccgatctacaacccgaccgagcaggacattatcgatctgaaattcgcgattgcggattctggtctgtctgttagtgagctggtaagcgtggcctgggcatctgcttctaccttccgtggtggcgacaaacgcggtggtgccaacggtgcgcgtctggcattaatgccgcagcgcgactgggatgtgaacgccgcagccgttcgtgctctgcctgttctggagaaaatccagaaagagtctggtaaagccagcctggcggatatcatagtgctggctggtgtggttggtgttgagaaagccgcaagcgccgcaggtttgagcattcatgtaccgtttgcgccgggtcgcgttgatgcgcgtcaggatcagactgacattgagatgtttgagctgctggagccaattgctgacggtttccgtaactatcgcgctcgtctggacgtttccaccaccgagagtctgctgatcgacaaagcacagcaactgacgctgaccgcgccggaaatgactgcgctggtgggcggcatgcgtgtactgggtgccaacttcgatggcagcaaaaacggcgtcttcactgaccgcgttggcgtattgagcaatgacttcttcgtgaacttgctggatatgcgttacgagtggaaagcgaccgacgaaagcaaagagctgttcgaaggccgtgaccgtgaaaccggcgaagtgaaatttacggccagccgtgcggatctggtgtttggttctaactccgtcctgcgtgcggtggcggaagtttacgccagtagcgatgcccacgagaagtttgttaaagacttcgtggcggcatgggtgaaagtgatgaacctcgaccgtttcgacctgctgtaatctgaccccgttcagcggctgcttgctggcagtcgctgaacgttctttaccagcgtatagtgggcgaacgaaaactacacactggatctctcatgtctgccgcaggaaagagcaacccactggcaatcagtggcctggttgtgctcacacttatctggagttatagctggattttcatgaagcaagtcaccagttacatcggtgccttcgactttaccgccttacgctgcattttcggcgctctcgttttattcatcgtccttttattacgtggtcgcggaatgcgcccgacaccgtttaaatacaccttagccattgccctgttacaaacctgcgggatggttggtctggcgcagtgggcgttggtcagcggaggtgcggggaaggtggcgatcctgagctataccatgccgttctgggtggtgattttcgccgcgttgtttctcggtgaacgcctgcgacgtgggcaatatttcgcgattctgattgccgctttcggcttatttttggtgttgcagccgtggcaactcgatttctctagcatgaaaagtgccatgctggcaatcctctccggcgtcagttggggggcgagcgcgattgttgctaaacgtctgtatgcccgtcatccgcgcgtggatttattgagcttaacatcctggcagatgctgtatgcggcgctggtgatgagtgtggtcgctttactggtgccgcaacgtgaaattgactggcagcccaccgtgttctgggcgctggcctacagtgcgattctggcgacggcactggcgtggagcttatggttgtttgtattgaaaaacttgcctgccagtattgccagcttaagcacactggccgttcccgtttgcggcgtactcttttcctggtggctgctcggcgagaatccgggggccgttgaaggtagcggtattgtgctgattgtgctggcactggcgctggtgagccgtaagaaaaaagaagccgtcagtgtaaaaaggatctgaattttttcttcatgtggggcgatctcttatttaacaaaataacgataatgccccaccatccgccagttaaacagcacatcttcttcctgcgcgcctgcgccaatgttatgtatcaccagcggcgtaccgtcgcgggcgaagccatcactaaccaccccaatatgtgccagcccgttatccagtcgccaggagacaatatcgcccgcttgatagtcactggggttcttgctggtggggcgtgttttatcatggcggctaaaccaggtttccagattaggcacccgacggtgatcgatgttgctgtccgggcgctttaacttccatttttgcgggtactcagcaaaattcttcgccatatcttcgtgaaccagtttctgcaaatcgaccttctggctgcgcaatgcgcggatcaccacatcggaacatacaccgcgttcttgcggaacatcaccgccaggataagtaagctgcacatacgccggatcgtaaaatagcgtgctgccaatttgctgtctggcaccgtctgcgatggcaaggttggtattggcctggatttgtaccacggttggtggaacggcgggagattttaaggagtggctggtaaatgccgttagcaggctgagcagcgccagactagctttcatctggttcgtccgtgaaaataagagtcacagattcgaccttccgggctaacgattgttctgtagagaaaatgtccagaagcggataaaaaattcctgaacaacgtgggagtttcagattactggcacagagtgccggatgcggagtgaacgccttatccggcctacaaaagcacgcaaattcaatatattgcagagattgcgtaggcctgataagcgtagcgcatcaggcaattttgcgttcaaactcccggacaagccgggagtttggagtaggttattcccactcttgcaggaaacgctgaccgtactggtcggctaccagcagagcggcgtaaacctgatctggcgtcgcgccgccaggcatgttgtgaatggtttcaccttctgcacatgccgcttctgccacaattcgcattttcgccgggacatcttctttaatatccagttgagcgagagttattggcaaacctaccgcatggctaagggcagctacggtttcgatttcctccaccggcgcattttccagaaccagctgcgtcagcgtaccgaatgccactttttcaccgtgataatagtgatgcgcgtccgggatagcggtcaggccgttatgcactgcgtgcgccgcagccagaccaccactttcaaaaccaacaccgctcaaataggtgttcgcttcaatcacgcgctccagcgccggagtcactacatgctgttcggcagcaagcatcgctttttcgccttcttccagcagggtgttgtagcacagttcagccagtgccagcgcagcctgggtgcacttgccgcccgccatggtggtcgcgccgctacgagagcaggcacgcgcttcaaaccaggttgccagcgcatcgccgatacccgccgctaacagacgtgcaggtgcgccagcgacgattttggtgtcgacaatgaccatattcgggttatttggcaacagcagatagcggtcaaactcaccctcatcggtgtagataacagacaatgcgctgcacggtgcatcggtagaggcgatagtcggtgcgatcgctaccggaacacccatgaaatgtgccagtgctttggcagtatcgagggtttttccgccaccgataccgagaattgcgccacactgcgcagtctccgcgatgccacgcagacggtcgatctcattttggctacattcaccgccaaacggcgcaatttctactaccagtccagcatctttaaagcttttctcgacagtggattgagcaaaacctaaaacaaatttgtcacccaccactaaccagcgttctgccagcggcttcaggtattcgcccagacgattaatcacatcagcgccctggatgtatttacccggactttgaataatgcggtccataattgctcctttagagatgagtagtgccaaatgcggcattccagtcgtgttcgaacttctctatagcactctctaccgcaggggtgttgagcatttgttgcgctacatctaagggcagggtgatggattcacatcctgccagtaaacagtccagcgcctgacgcggcgttttaaagctggctgccagcaccatgctttctggcgcgtgcatttctaacagcgtttgcagctcctgaaccgtacgaatgccgtctccgccctgggcatctacgcggttaacatacggagcaacgtattttgcccctgccagtgcggctaataacccttgtgcggcgctatatacagcagtgccaagtgtagtaataccctcttttttcagtattttaattgctgccagaccttcggaagtcaccgggattttcaccacaatacccggaatagcgtcgcgcaggcgcttcgcttcttccaccatcccctgcgcgtcgcggctcatggtctgagcaaacagaatgccctcatcaccaatcgctttttgcagacgcggcagcacttcccatatggactccttgctggcagcgataatgctcgggttagttgtcaccccggcaatggggaatatgcgtgccagacgttcgacttctgcgacgttagcggtgtccagatacagttccatgatgtttccttttacagttccagttcatgttgcagcaggctggcgatagcgtcggcagaggcggcgttaaccagcgcgttacggaattcttcgtgcatgatgcggcgagcgaggcggctgaaaatgcgcatatgctgatcgcccgcagcgtgtttgttcagggttaacataatgatgaattgcgcttcatcatcgccccagcgcaccggcgcttgcagacgcgccacgctgatggtggattgctcaatgtgttcacttttgctgtgtggaatggcaaaactaaagcccagaccggtagagaaaacggcctcgcgcgcccacaagtcggcttccagtttacgcggatagcggcagcggcccgccagcagcaggttatcggtcatgcctttgagcacttcttctttgctgcgccagtcgctttccagtgtgatgcactcggcggtgaccagcggtgcgtcttgttgggtcatgcggaattgcgccagcaggtgttctacttccaggctagtacggcaggccattgcctggttgagcaacttgcggcactcacggctatcaagttgcgccatccgagctttcgccgccggaatacttggtgcgctcatgctgagttcatccagccctaagccgaccagcaacggcagcacggaacctttcgctcccagctcaccgcacagaccaatccatttgccctggcgatgcaccgcttgcacggcgtaatcgagcgcccgcaagaatgccggattcaggctgttgtagtgacgagtaaccttagcgttatcgcgatccaccgccagcagatactgcgtcaggtcattactaccaatactaaagaaatcaatctcttcgcagcattgatcgatgatgaacatcacgctcggcacttccagcatgatgccgagctggattttctcatcaaacggaatgtgttcgttacgtagttgctgtttggcttccgccagtttttctttcacccataagatctcttccatactggagatcatcgggatcatgattttcaggctgccgtgagcggaggcgcggaggatgctccgtagctgcgtggtaaacaagctcgcgtactcttcataaatacgcacggcgcgataaccgaggaacgggtttgcctctgcgggaatgttcagataatcaacgggtttgtcgccgccaatgtccatagtgcgcacaataatgctgcgtccgttggcggattccagcgcctgacaaaaaatgttgtacaactcgctttcgcccggtgcgctggtgcgatccatatagagcatttcagtgcggaacaaaccaacgccttccgcaccattgccgaatgcggcctgcgcttccacggagtgagcgatgttagcggcaatttcaatgcggataccgtcagcggtacgggcttgttgggtcagccagacacgctgttgctcacgcagggcgtcctgtacgcgggcttcttgctgataataacgagctacggcttcccctggctcaaccacaatcgccccggcgttgccgtcgatataaatcgtttgttgctgccacggagtaagggcatcaatatccacaccaaccagcgttggaatgttgaagctacgggcaaggatcaccgtatgactggtggtgccgccgcttttgagcaacaatcctttgaggtgatttttatccagttcgaggaactggctgggggtcagttcatcagccatacaaatggcgggctgcgtcagtttgcccggtgccgggaagcgttgctcaccgtagatttgctggagtaactggaagcagacgtcgcgtacgtccagggcacgttcttgcaggtagctgctgctggaacgggaaaactcttcgcaaaagtgattcgcgctggcaacaattgcttcggcgcagcttaatccggcgctgacgcctgccagtaaatgttcgcgcagggaagtatcgccagccagggatcggtgagcttccagaatcgcgctggtagcaccgtcgctatccagcagacgaaactcaatgtttttcagtaccagcgtcaggccgttttccagtgcggattgctcggcgtcaacgcctttggctgcgggaagattacccagcgcattgagatctaaagaagagatcggcgtcagaatgccgcctgcactaccgctgcacacggtgcgggcgcggataatttgcggattcagattggtcagactaaccggcagtggttccagttcgtcagatttaacttccgccagcggcgcatcgcagtgggggaattcatcgcgcagccattggcttaaacgctggtgcgcttcctgttcgtcggccccggaaatcagtaactggcagttatcgcccgccagcgtatcggtgccaatcagcgcaagggcgcttttggcgttgcccttgcggtcagtgcgcaggttatgccactcaatttgactactaaaagtattacacagcgtttcaacgtggcttgccggacgcgcatgtacgccgttaggtagctcacaaataaattccacaatcagggccattgcctctctcccggtacggttttctgtttacaggataagagcgcacggcaacggcctgccatgtgacaaatctgccaaaagctggacaaatgtaatgtaaccgtcaatttgcgacgcgtctcacaagacgctgttttgcggcatgcttccggtttatcgcaagttatgaggcggatcgcatttttgtactgatattacaaaagtccagtaaatggcctttttatccactgtttgctccgcctgcgattgcctattgtttcctccatcaaaaatatggacatgggctttcgcaagcccgggagcagcttatgaatgagttggtgcagatcctgaaaaatacccgtcagcatttaatgacgggcgttagtcacatgattcccttcgtggtaagcggcggtattttgctggcggtttccgtcatgttgtatggcaaaggcgcagtgccggatgccgtagccgatccaaatctgaaaaaactgtttgatatcggcgttgcgggcttgacgctgatggtgcctttcctcgcagcgtacatcggttattccattgcagagcgttctgcgctggctccgtgcgctatcggtgcctgggttggtaacagctttggtgcgggcttctttggtgcactgatcgccgggattatcggcggcatcgtggtgcattacctgaagaaaattccggtgcataaagttctgcgcagcgtgatgcctatcttcattattcctatcgtcggcacactgattaccgcaggcatcatgatgtggggcttgggcgagcctgtaggggcgttgaccaacagcctgactcagtggcttcaggggatgcagcagggcagcattgttatgctggcggtgatcatgggtctgatgctggcgttcgatatgggcggtccggttaacaaagtggcctatgccttcatgctgatttgcgttgctcagggtgtttataccgtggtggccatcgctgccgtgggtatttgtatcccgccgctggggatggggctggcgacgctgattggtcgtaaaaatttctccgcagaagagcgcgaaaccggcaaagcggcactggtgatgggctgtgttggcgttactgaaggggcgattcctttcgccgctgccgatccgctgcgtgtcattccttccatcatggtcggtagtgtttgtggtgcagtaactgcggcgctggtcggtgcgcagtgctatgcaggctggggtggtctgattgtgctgccggtggttgaaggcaagctgggttatatcgcagcagtggctgtcggagcagtggtgacggctgtttgtgtgaacgtgctgaaaagtctggcgcgtaaaaatgggtctagcactgatgaaaaagaagacgacctggatttggattttgaaattaattaattgaggaacgagccatgacgaaaattattgcagtaaccgcatgtcctagtggtgttgcccatacctatatggcagcagaggcgctggaaagtgccgcgaaagcgaaaggctgggaagtgaaagtagaaacccaggggagtattggtctggaaaatgaactgactgcggaagatgtggcgagcgctgatatggtgattctgaccaaagatatcggcatcaagtttgaagagcgttttgctggcaagaccatcgtgcgcgtcaacatcagcgatgcagtaaaacgtgctgacgccattatgagcaaaattgaagctcacctggcgcaaaccgcttaagttcttctcccgctcgcaagggcgggttcgctttcccacaggagttcctcatgacgaatcgtatctctcgcctcaaaactgcactgtttgccaatacccgtgaaatcagcctggagcgggcgctgctttataccgccagccatcggcaaaccgaaggcgaaccggtgatattgcgccgggcgaaagcaacagcgtatatccttgaacatgttgaaattagcattcgtgatgaagaactgattgccggtaaccgcaccgtaaaaccgcgcgccgggattatgagcccggaaatggacccttactggctgctgaaagagctggatcaattcccgacgcgtccgcaggaccgctttgctatcagcgaagaagataaacgtatctaccgtgaagagttgttcccgtactgggaaaaacgtagcatgaaagatttcatcaacgggcagatgacagatgaagtaaaagccgcgaccaacacgcagattttcagcatcaaccagacggataaaggccaggggcacattattattgattacccacgcctgttgaatcacgggctgggtgagctggtggcacagatgcagcaacattgtcagcaacagccggagaatcacttttatcaggccgcgttgttactgctggaagccagccagaaacacattttgcgttacgccgaactggcggaaacgatggcggcaaactgcacagatgcccagcgtcgcgaagagctgctgactattgcagagatctcccgccataacgcgcaacataagccgcagacgttctggcaggcgtgccagttattctggtacatgaacatcattctgcaatacgaatccaacgccagtagcctaagcttggggcgcttcgaccagtatatgttgccgttctatcagacaagtttaacccagggcgaagatgcggcgttcctgaaagaactgctcgaatctttatgggtgaaatgcaacgacatcgtgctgttgcgctccaccagtagcgcgcgttatttcgccggtttcccgaccggctataccgcactgctcggcgggttaaccgagaacggacgtagcgcggtgaacgtgcttagcttcctttgccttgacgcctatcaaagcgtgcaattaccgcaaccgaacctcggcgtgcgcactaacgccttgatcgacacgccgttcctgatgaaaaccgccgaaaccattcgcttcggtaccggtattccgcaaatctttaacgatgaagtggtggtgccagcgttcctcaaccgtggcgttagcctggaagatgcgcgcgactattccgtagtgggctgtgtggaattatctattcccggcagaacctacggcttgcatgacatcgcgatgtttaatctgctgaaagtgatggaaatctgcctgcatgaaaatgaaggcaatgctgcgctgacttatgaaggtttactggagcagatccgcgccaagatcagccactacatcaccctgatggttgagggcagcaatatttgtgatatcggccatcgcgactgggcacctgtaccgctgctcagtagctttatcagcgattgtctggaaaaaggccgcgatattaccgatggcggcgcgcgttataacttctccggcgtacaggggatcggtatcgccaacctgagcgattctctccatgcgttgaaagggatggtttttgagcaacagcgtttaagttttgacgaattgctgagcgtattaaaagccaacttcgcaacgccagaaggcgaaaaagtccgcgctcgcttaattaaccgcttcgagaaatacggtaacgatatcgacgaggtggataacatcagcgccgaactgttgcgccactactgcaaagaagtggaaaaataccagaacccgcgcggcggctacttcacgccgggaagctataccgtttctgctcacgtcccgttgggaagcgtggttggcgcgacgccagacggtcgttttgccggagaacagctggcagacggcggcttgagtcccatgctgggccaggacgcacaagggccaacagcggtactgaagagtgtcagtaagctcgataacacgctgctgtctaacggtacgttgctgaacgtgaaattcactccggcgaccctggaaggtgaagcaggattacgcaaactggccgacttcttacgggcgtttacccagcttaagttacaacatattcagtttaacgtggtgaacgccgacacgttgcgggaagcgcaacagcgcccacaagattatgccgggctggtggtgcgcgttgccggatacagcgccttctttgtcgaactgagcaaggagatccaggatgacatcatccgccggacagcgcatcagctgtaattaaactgtcgaaggagatccaggatgacaagttccgccggacagcgcatcagctgtaacgttgtggaaacgcgccgcgatgatgtggcgcgcattttcaacattcagcgttatagtctgaatgacggcgagggcattcgtacggtggtcttttttaaaggctgtccgcatctttgcccgtggtgtgctaatccggagagcatctccggcaaaatccagacggtacgcagagaggcgaaatgtctgcactgtgcgaaatgtttgcgtgatgcggatgaatgcccctccggggcgtttgaacggattggtcgcgatatcagccttgacgctctggaacgggaagtgatgaaagatgacattttctttcgcacgtccggcggcggcgtcacgctttctggcggcgaagtgttaatgcaggcggagtttgctacccgttttttacagcgactgcggctgtggggtgtgagttgcgccattgaaactgccggagacgcaccagccagcaagctattaccgctggcgaaattgtgcgatgaagtgttgttcgatttaaaaattatggacgcgactcaggcgcgggatgtggtgaagatgaacctgccacgcgtgctggagaatctgcgtttgctggtgagtgagggcgtcaacgtgatcccgcgtttaccgctgatccctggtttcacgctcagccgggagaatatgcagcaggcgctggatgtactgatcccgctgaatatcaggcagatccatctgttaccgtttcatcagtacggcgaaccgaaataccgcctgctggggaaaacatggagcatgaaagaggtgcctgcgccgagcagtgctgatgtggcaacgatgcgcgaaatggcagaacgggccggacttcaggttaccgtgggaggttaaaatggcatacctggtggcagtaaccgcctgcgtaagcggcgtggcgcatacttatatggcggcggaacggctggaaaagttgtgcctgttagagaagtggggagtcagcattgaaactcagggcgcgctgggaacggagaatcgtttagcggatgaggatatccgccgggcggatgttgctctgttgattacggatatcgagcttgccggtgccgagcgatttgaacattgccgctatgtgcaatgcagcatctacgcattcctgcgtgagccgcagcgggtaatgagcgcggtgcgcaaagtgctttctgcgccgcagcaaacccatcttattctggagtaattattctggagtagtcggtttttctgtcagttggctgtggtactgccggcgatattcgctcgggctgcgttcggtgtttttacgaaacagacggcagaagtagttgctgtcgacaaagccgcaggcgtgcgccacttcttttaccttcaggtcatagcctttcaataacgtcttagcgtgctccagtcgcgtgtgattcaggtattcgttaaaaccaatggcccccgttttttgaaacaggtggctgaggtaatttgggctaatataaaacgcctgtgcaacagattcgcgggtaagcgcggaggcatagcgttcgtcgatataatcgcgaatagcttcaaatagtgcctggctgcgactggcggtctggatttggctgccaagcaaatcgcggcagtggctaagcaggctggcgacgataagccttgccgtttgctgctcctgcggctgcatttgcatttcattgagcgtttgtagcagaaaagaacctatgcgtgggccgcgtcgggcgacgtgttgcttcgccagattttgatattgtttgccatcccattgcacgacgctgaagccgagttgctgtttgccaaacagcacgctaaaggtagtagcgggggcttgccattgtggaaaattccagccaccagcaggaacgtacagcacatcgccgggaactaacgttgctccagcgccggtatcaacaaactcaccttccagcacaatttccagccgtggaaaatcgacctgatacgcaagatcgggcaccgggccgttactgctggcaaagtaaatctggcgcagggacagcgggccgttgatcaggcgggagagcagatagctgacgtcgtgatacatgttattcccttaggtatgtagacgggaaaacagtaactggcattattaaaaaaggccacctgaaaagtgtggcctgaggggagttcgatgtaaacattgcggcagttgtattgccggatgtggcgtaaacgccttatccagcctaccgccgcgatctgtaggccggataagacgcgtcaagcgtcgcatccggcaaatagcgcctggctgataattactgattacccacctgatcgccatagggcagtgtgtcgtaatcgatcagtgcgtttttcttatacgggttaccaatccagcgggtagtttctttgaactgcggattcaccacactacgggttggatcgtaaccgtcgtaagataagcccgccaaatcactccaggtgtggatcagttccgccaggctgtatttacgatcaacatcctggctgaaatcacggggatgagtcgcttgccatttttcactcgtccacagcaggaacggaatggtgtacatatgacgcgtcgggttgtcctcattacgcccctgagttttgtgcggcggcgtgtcgtaaacctcttcaccgtggtcagagaaataaaccaggaaaccgttcgggtttgctgctttaaagtctttaatcaggctggcaaccacatgatcgttatacaggttagcgttgtcataatcgttataactctccagctcttccgcgtttaatcccggcggaacatgatcggtattgccatcaaacttgccctgattttccgggtagcggtatttgtatttgatatgcgtacccagcagatgaacaatgatcagtttcttcggcgcagggtcattcagcacttcctggaacggcttcagcacgttggtgtcgtattcacgcgcactctgcgtacgttgctggttcatgtagtactgcttgtcggtctggcggctaaataccgtcagcatggtattgcgggcggtcatcgtctgctggttggtgatccagaaggttttataacccgcctgtttcatcatgttcatcaggctcggctgcgtcagatacagatccgggttcttttcattggcaaaggtcagcgcctgttgcaggatttcaatggtgtacggacgagacgtaactacgttattaaacacggtcagattcggatcggttttatgcagcgcatccagctccggcgtggtttcacgcggataaccgtacagactcatgcgtccgcgctgggtgctctcgccaatcaccagcactaaagtgcgcggttcgttaccgctttcatctttgaaattagccagtggcggcaaggcattattttcattcagtaactttgttaggctgtttagttgctgacgatactgataatagccggtcaggaattgccacggtgcggcaggctccatacggctggccaggttatccaacgttttctcaaacggcttgtttttgataaacgtattcatggcgatcggatgcagaatcaagccataaagcagggcaaaagagacaacataacgccacggctttggaatatagaccgggcgcaggcgtgtccacagcagaactgccaccgccgtataggccagcgcgataagcacaattttcaggctgaaatactggcttaaatactcgctggcttcgttggtgttggtttcgaacatcacaaacagaacgctctggctgaactcctgaccgtagatgacgtagtagcacagcgccgccagagaggccgcccatagcaccacgccgattactgcggcaataattttaatccgcttcggaaagaggaataccgggatcaaccacaggctactgaataacaggctgtcgcgaatgccgttagtgccactataaccactgatgtaaataatggcctgtagcagagtagagaaaaaccaaaagtagagcagtgcccaacccagggctttccagctaaaaagaggtttagcctggacttctgtggaatgcatagtaagaacctgtcttgaaaaaatatcgccgaatgtaacgacaattccttaaggatatctgaaggtatattcagaatttgaataaaatgcagacagaaatatattgaaaacgagggtgttagaacagaagtatttcagaaaaccctcgcgcaaaagcacgagggtttgcagaagaggaagattagccggtattacgcatacctgccgcaatcccggcaatagtgaccattaacgcttgttcgacgcgaggatccggttcctggccttctttttctgcctggcgggagcggtgcagcaactcggcctgcaatacgttcagcgggtcggtgtaaatattccgtagctgaatagactctgcaatccacggcagatcggccatcagatgggaatcgttggcaatcgccagcaccactttgatgtcttcttcttgcaggttgcgtaactctttacctaacggccacagtgctttgtctaccaggcgttggtcatagtattccgccagccacaggtctgctttggcgaagaccatctccagcatgccgagacgcgtgctgaagaatggccaatcgcggcacatagcctccagctcgctctgtttgccgtcttcgaccactttttgcagcgccgtacctgcacccagccaggcggggagcatcagacggttttgcgtccaggcgaagatccacggaatggcgcgtagactctcgacgccgccggttgggcgacgtttcgccggacgactacccaacggcagtttgcccagttcttgttccggcgtagcggagcggaagtaaggcacaaaatctttgttttcacgtacgtagccgcggtagacatcgcaggagatgacactcagttcatccataatgcgacgccagctctctttcggctccggcggtggcagcaggttggcttccagaatcgccccggtataaaggctcaggctgctgacggtgatttctggcagaccatatttaaagcggatcatctcgccctgttcggttacgcgcaggccgcctttcaggcttcctggcggttgactcagcagcgccgcatgagcaggtgcgccgccgcgaccaatggaaccgccgcgaccgtggaacaacgtcagctcaatacccgctttttcgcaggttttgattaatgcatcctgtgcctgatattgcgcccaggaagctgccatcactcccgcatcttttgcactgtcggaatagccaatcatcaccatctgtttgccctgaatcaggccacgataccagtcaatattgagcagctgggtcatgacatcgttggcgttgttcagatcatcgagggtttcaaacagcggagcaaccggcatcgcaaacccgatacccgcttctttcagcagcaggtggacagccagtacgtcggacggcgttttcgccatgctgatcacgtaggcggcaatggagccttgcggtgcttcggcaatcacctggcaggtatcgagcacttcgcgcgtttcggcgcttggttgccagttgcgcggcagaagcggacgtttggagttcagttcgcggatcaggaacgcctgtttgtcggcctcactccagctttcgtagtcgccgataccgaggtagcgggtcagctcgcccagcgcttcggtatgacgcgtgctctcctgacggatatcaatacggaccagcggtacgccgaaacatttcacgcggcgcagggtgtcgagcagatcgccgttggcgataatacccatgccacacgcctgaagactctggtagcaagcgtagagcggttcccacagttcttcgttttgtgtcagcaggccttctggttttggcagttcttcgcctttcaggcgcgcttccagccatgcctgtgtcgccatcaggcgagaacgcaggtttttcatcagatagcgatacggttctgcggcaccttcttcgccaaccagcgccagcagttcaggggtcgcttcaaccatgctcagttcagaaaccagcacctgaatatctttcaggaacaaatcggtggctttccagcggctgagtagcaggacgtggcgggtgatatcggcagtgacgttcgggttgccgtcgcggtcgccgcccatccagctagtaaaacggaccggaacaaattcgacgggcagtttgtagccgaggttctcttccagttgttcgttcagttcgcgcaggtaatttggtacgccttgccacaggctgttttccactacggcaaagccccatttggcttcatctaccgggcttggacgcagcttacggatttcatcggtatgccaactctgggcgatcaactggcgcaggcgacgcatcagctggttgtgttcgtagtcagcgatatctttgttatcgagctgttttaaacaggcgttcacttccaccattttgtggatcagtgtacgacgggtaatttcggttgggtgagccgtgaggaccagttccaggctcaggctttccactgcttttttgatggtgtcttcgctcagttccggctggtttttcagtttacgcagggtgcgggcgatcacttccgggttgctggcagcttcgcctttcgggctaatgctgtggtattgctcggcggtgttggccaggttcaggaactgactaaacgcacgcgcaacgggcagcagctcgtcgttgctcaaattttgtaaggtggtgagcaactcctggcggttagcatcattgccagcgcgactagatttgctcaacttacggatagtttctacgcgttcaagaatgtgttctcccaacgcatccttgatggtttctcccagcactttgccgagcatactgacattactacgcaatgcggaatattgttcgttcatattaccccagacaccccatcttatcgtttgatagccctgtatccttcacgtcgcattggcgcgaatatgctcgggctttgcttttcgtcgtcttttataaagccacgtaaaagcggtgacgtcaaatgctgcgaaatcgcttcagcaaacgaataaatagcaggaatttacgtcattaaattcacgacgctttaaataagcgtaacttatggaaatgttaaaaaatcgccccaagtaacaccaaaggtgtaggtcggataagatgcgcaagtatcgcatccgacattattgcggcactggagtttggcaacagtgccggatgcggcgcgagcgccttatccggcctacagttgggcatcgtttgagtcactgtcggtcggataagatgcgcaagtatcgcatccgacattattgcggcactggagtttggcaacagtgccggatgcggcgcgagcgccttatccggcctacggttgggcatcgtttgagtcactgtaggtcggataagatgcgcaagcatcgcatccgacattattgcggcactggagtttggcaacagcgccggatgcggcgcgagcgccttatccggcctacgttttaatgccagcaaaaatggtgaattacctgggttatcagttcgcgggtgggcttgataaaccgtgtttccagatattcatcaggttgatgagcctgattaatactgccaggccccaacaccagcgtcgggcataacgtttgaataaacggcgcttcggtacagtagttcaccacttcggtttttgctccgagcaatttctcaaccacttcaaccagttgatgattcggtgggcattcatagccagggatcggcggatgcagctcgtcgaccgtcagacgacccggccagcgttcgctcaccggagccaatgcatcgttgagcaaaccattaagttcattgagtgtcatgccaggcagcggacgaatatccatatgcaactcacagcaagcgcaaatacggttagaagcgtcgccaccgtgaatatgcccgaggttgagcgtagggtatggcacggtaaacgcttcgtagtgataacgttctttcaggttatcgcgcaattgcaaaatatgcccgatggcgtcgtgcattagttcgatagcgttaactccgcgtgctggatcgctggagtgcccgctctggccctgaatacggatggcgttagagatatgacctttatgtgcgcgtaccggttgtagactcgtcggttcgccaatgatggcgcaatccgggcgcagggcggtagtttcggcaaaataacgcgctccggccatactggtttcttcatcagcagtcgccagaatgtagagcggttttttcagtttcgtgacgtcgacatcgcgtagcgcatcaaggataaacgcaaaaaagcctttcatgtcggcggtgcctaagccgtaaagcttgccgtcatgctccgtcagtgtaaacggatcgcgcgtccagcgaccgtcatcaaatggcaccgtatcggtatgccccgccagcaacaagccgccagccccctgtccgatacttgccagcatattgaatttgttgcgagttcctggaacaggctgcacttccacattgaagcccaaatctttaaaccagtccgccagcagagtgattaaatctgcattgctttgatcgagtgcctcttccgtggcgcttatactaggtgtggcaatcagagcgcggtaaatctcgataaatggcggtaatttgtttttcattgttgacacacctctggtcatgatagtatcaatattcatgcagtatttatgaataaaaatacactaacgttgagcgtaataaaacccaccagccgtaaggtgaatgttttacgtttaacctggcaaccagacataagaaggtgaatagccccgatgttgaatacgctgattgtgggtgccagcggctacgctggcgcagagctagtgacctatgtaaatcgccatccgcatatgaacataaccgctttgactgttagtgcgcaaagcaatgatgcgggaaagttaatctccgatttgcatccgcagctaaaaggcatcgttgatctgccgttgcagccgatgagcgatatcagcgagtttagcccaggggtggacgtagtgtttctcgccaccgcccatgaagttagccacgatttagcgccgcagtttcttgaagcgggctgcgtggtgttcgacctttccggcgcgtttcgtgttaacgacgccaccttctatgaaaaatattacggctttacccatcaatacccggaactgttggaacaggcagcctacggtctggcggagtggtgcggtaataaattaaaagaagcgaatttgattgcggtgccgggctgttatccgacggcggcacagctggcgctgaaaccgttgattgatgccgatcttcttgacctcaatcagtggccggtgatcaacgccaccagcggcgtgagcggtgcagggcgtaaagcggccattagtaacagcttttgtgaagttagcctgcaaccgtatggcgtctttactcatcgccatcaaccagagatcgccacacacctcggtgctgacgttatcttcaccccacatctgggcaatttcccgcgcggcattctcgaaaccattacctgccgcctgaaaagcggtgtgacccaggcgcaagtcgcgcaagtgttacagcaggcgtatgcccataaaccgctggtgcggctgtatgacaaaggcgttccggcgctgaaaaatgtcgttgggctgccattttgcgatatcgggtttgccgttcagggcgagcatctgattattgtggcgaccgaagacaacttactgaaaggcgcggcggcacaagcggtacagtgcgccaatattcgtttcggctatgcggaaacgcagtctcttatttaagggtgcaatgatgaatccattaattatcaaactgggcggcgtactgctggatagtgaagaggcgctggaacgtctgtttagcgcactggtgaattatcgtgagagtcatcagcgtccgctggtgattgtgcacggcggcggttgcgtggtggatgagctgatgaaagggctgaatctgccggtgaaaaagaaaaacggcctgcgggtgacgcctgctgatcagatagacattatcaccggagcactggcgggaacggcaaataaaaccctgttggcatgggcgaagaaacatcagattgcggccgtaggtttgtttctcggtgacggcgacagcgtcaaagtgacccagcttgatgaagagttaggtcatgttggactggcgcagccaggtagccctaagcttatcaactccttgctggagaacggttatctgccggtggtcagctccattggcgtaacagacgaagggcaactgatgaacgtcaatgccgaccaggcggcaacggcgctggcggcaacgctgggcgcggatctgattttgctctccgacgtcagcggcattctcgacggcaaagggcaacgcattgccgaaatgaccgccgcgaaagcagaacaactgattgagcagggcattattactgacggcatgatagtgaaagtgaacgcggcgctggatgcggcccgcacgctgggccgtccggtagatatcgcctcctggcgtcatgcggagcagcttccggcactgtttaacggtatgccgatgggtacgcggattttagcttaagttttgttggccggaggcgcagctttccggcattgaatttcaaaataaggaaacagagttatggcactttggggcgggcgttttacccaggcagcagatcaacggttcaaacaattcaacgacagtctgcgctttgattaccgtctggcggagcaggatattgttggctctgtggcctggtccaaagccctggtcacggtaggcgtgttaaccgcagaagagcaggcgcaactggaagaggcgctgaacgtgttgctggaagatgttcgcgccaggccacaacaaatccttgaaagcgacgccgaagatatccatagctgggtggaaggcaaactgatcgacaaagtgggccagttaggcaaaaagctgcataccgggcgtagccgtaatgatcaggtagcgactgacctgaaactgtggtgcaaagataccgttagcgagttactgacggctaaccggcagctgcaaagcgcgctggtggaaaccgcacaaaacaatcaggacgcggtaatgccaggttacactcacctgcaacgcgcccagccggtgacgttcgcgcactggtgcctggcctatgttgagatgctggcgcgtgatgaaagccgtttgcaggatgcgcttaagcgtctggatgtcagcccgctaggctgtggcgcgctggcgggaacggcctatgaaatcgaccgtgaacagttagcaggctggctgggctttgctagcgcgacccgtaacagtctcgacagcgtttctgaccgtgaccatgtgttggaactgctttctgctgccgctatcggcatggtgcatctgagccgttttgctgaagatctgattttctttaacaccggcgaagcggggtttgtggagctttctgaccgcgtgacttccggtagtagtttaatgccgcagaagaaaaacccggatgcgctggagctgattcgcggtaaatgcggccgggtgcagggggcgttaaccggcatgatgatgacgctgaaaggtttgccgctggcttacaacaaagatatgcaggaagacaaagaaggtctgttcgacgcgctcgatacctggctggactgcctgcatatggcggcgctggtgctggacggcattcaggtgaaacgtccacgttgccaggaagcggctcagcagggttacgccaacgccaccgaactggcggattatctggtggcgaaaggcgtaccgttccgcgaggcgcaccatattgttggtgaagcggtggtggaagccattcgtcagggcaaaccgctggaagatctgccgctcagtgagttgcagaaattcagtcaggtgattgacgaagatgtctatccgattctgagcctgcaaagctgcctcgacaagcgtgcggcaaaaggcggcgtcagtccgcagcaggtggcgcaggcgattgcttttgcgcaggctcggttagggtaagaacatttatatgtataaatttgagcctggcttatcgccgggcttttttatggcaaaaaaaagcggatcctggagatccgcaaaagttcacgttggctttagttattcgagttgagaaactctcgaaacgggcagtgacttcaagggttaaaagaggtgccgctccgtttctgtgagcaattatcagtcagaatgcttgatagggataatcgttcattgctattctacctatcgccatgaactatcgtggcgatggaggatggataatgaatattcgtgatcttgagtacctggtggcattggctgaacaccgccattttcggcgtgcggcagattcctgccacgttagccagccgacgcttagcgggcaaattcgtaagctggaagatgagctgggcgtgatgttgctggagcggaccagccgtaaagtgttgttcacccaggcgggaatgctgctggtggatcaggcgcgtaccgtgctgcgtgaggtgaaagtccttaaagagatggcaagccagcagggcgagacgatgtccggaccgctgcacattggtttgattcccacagttggaccgtacctgctaccgcatattatccctatgctgcaccagacctttccaaagctggaaatgtatctgcatgaagcacagacccaccagttactggcgcaactggacagcggcaaactcgattgcgtgatcctcgcgctggtgaaagagagcgaagcattcattgaagtgccgttgtttgatgagccaatgttgctggctatctatgaagatcacccgtgggcgaaccgcgaatgcgtaccgatggccgatctggcaggggaaaaactgctgatgctggaagatggtcactgtttgcgcgatcaggcaatgggtttctgttttgaagccggggcggatgaagatacacacttccgcgcgaccagcctggaaactctgcgcaacatggtggcggcaggtagcgggatcactttactgccagcgctggctgtgccgccggagcgcaaacgcgatggggttgtttatctgccgtgcattaagccggaaccacgccgcactattggcctggtttatcgtcctggcagtccgctgcgcagccgctatgagcagctggcagaggccatccgcgcaagaatggatggccatttcgataaagttttaaaacaggcggtttaaaccgtttaacgcagctacccgataggcttccgccatcgtcgggtagttaaaggtggtgttgacgaagtactcaatagtgttgccgccacctttctgttccataatcgcctgaccgatatgaataatttcggcagcgcgctcgccaaagcagtgaatacccagaatctcttttgtttcccgatggaacaaaattttcagcgtgcccacgttcatgccgacgatttgtgcgcgtgccagatgtttaaactgggcgcggcccacttcatatggcactttcattgcggtcagctgctgttcggttttgcccacagagctgatttccgggatggtgtaaataccggtagggatatcttcaatcagatgtgcggtggcttcgccttttaccagcgcctgcgcggcaatgcgcccctggtcataggccgcgctcgccaggctcggataaccaatcacgtcgcccaccgcgtaaacgtgtggctgtgcggtctgatacatgctgttgaccttcagctgtccgcggctgtcagtttctagcccaatgttctgtaacgccaggctatcggtattaccggtgcgaccgttggcatagagcaggcagtcagctttcagttttttaccgctcttcagatgcatgatcacaccatcgtcacagccttcgatcttctcgtactcttcgttgtgacgaatcactacgccactgttccagaagtgataggagagagaatcactcatctcttgatcgagaaatgccagcaggcgatcgcgggtgttgatcagatccacttttacatccataccgcggaagatgctcgcatattcacagccgatcactccagcaccatagataagtacatggcgcggttcgtggtgcatgctgagaatactgtcgctgtcgtaaatgcgtggatgggtgaaatcaacatctgttggatgatatggacgagagccgcaggcaataacaaatttttcagcggttagtgtttcaacgctgccgtccgggcaatccagcgccaacgtatgctcgtcaacaaagcgagcgtttccctgcaatatttcacagtgattacgttcgtaaaatccctgacgcatgcgcgtttgttgattaatcacgttatcggcatggttaaggatatcggcaaaagaagagcggagcagtcgggaatggtcgctgtaaagtgggttttgattgaattctataatgcggctgacggcgtgacggagagctttgctcgggatggtgccccagtgggtgcaaccgccgccaacattttgataacgctcgataactgcgacgcgcgcaccttgcttaaccaggcccattgcagcgccttcgccgccggggccggaacctattactatggcatcgtaatcgtaggaatgtggcatggtagggcttacctgttcttatacataaaagcaacagaatggtaacattttatcgcgggtaagccaattgatccccgtcatttatctggctatatcctgagcggcctttgctttgtctgtttcttacttttgccctgacgttttattggatttttatcgacgatactctccgtttaagcggcaggtttccgctgtacgtaaaagaaccggccaaagaattgcagtaaatatgttttattgcgttaccgttcattcacaatactggagcaatccagtatgttcattctctggtatagtgccagcagtacttttggcaaggatagtgacatcgtgatgggcgtaagagcgcaacaaaaagaaaaaacccgccgtagcctggtggaagccgcatttagccaattaagtgctgaacgcagcttcgccagcctgagtttgcgtgaagtggcgcgtgaagcgggcattgctcccacctctttttatcggcatttccgcgacgtagacgaactgggtctgaccatggttgatgagagcggtttaatgctacgccaactcatgcgccaggcgcgtcagcgtatcgccaaaggcgggagtgtgatccgcaccagcgtctccacatttatggagttcatcggtaataatcctaacgccttccggttattattgcgggaacgctccggcacctccgctgcgtttcgtgccgccgttgcgcgtgaaattcagcacttcattgcggaacttgcggactatctggaactcgaaaaccatatgccgcgtgcgtttactgaagcgcaagccgaagcaatggtgacaattgtcttcagtgcgggtgccgaggcgttggacgtcggcgtcgaacaacgtcggcaattagaagagcgactggtactgcaactgcgaatgattagcaaaggggcttattactggtatcgccgtgaacaagagaaaaccgcaattattccgggaaatgtgaaggacgagtaatgaaacaagcaaatcaagatagaggtacgctgctgctggcgttagttgctggcttaagcattaatggtactttcgcagcgctgtttagctccattgtgccattttctgtattcccgattatttccctggtgctgacggtttactgcctgcatcaacgttatcttaatcgcactatgccggtaggcttgccgggtctggcagctgcctgttttattctcggcgtactgctgtacagcacggtagttcgtgcggaatatccggatatcggctctaacttcttcccggcagtactctccgtcattatggtgttctggattggcgcgaagatgcgtaaccgtaagcaggaagttgctgagtaatcggtattatgccggatgctggcgcatccggcatgggttttacttcgcggtcagtaatacgccgcactccatatggtgcgtgtaggggaactgatcaaacagagccagacgttcgaccttgtgcgtctggcttaatgtttccagattcttgcataacgtttccgggttacaggagatgtacaaaatacgcggatacgcctgcaccattttctcggtttcactgtccagaccgctgcgcggagggtcgacaaaaatggtttcgcactgataactctttaagtcgatcccttgcaggcggttaaactcgcgcacaccattcatcgcctgagtaaattcttctgccgccatacgaataatttgtacgttatcaatatggttagctgcgatgttgtattgcgcagcagcaacgctcggcttagcgatttcggtggctaatacccgatcaaaattacgcgccagcgctaaactaaagttaccgttgccgcagtacagctccagtaaatcgcctttactgcctttggttacgtccagcgcccattccagcatctgaatattcatcgccgcgttcggctgggtaaagctgttttctacctgacggtagatcatctctttccctgcgaccggcagacgttcatcgatgtaatcctgatccagctcgattttggttttcgttgcccgaccaatcagatgcacattcagattctgcgcgcgcagtgcatcgcgcagggcctccgcttcctgacgccactcatcatccagcttcttatggtatagcagggaaaccaccgcctgattactcagtgtagtgaggtaatcaatctggaacaacttgtggcgcagaacgggattattacgcacacccgcaatcatcgccgtcatcaactggttgataagttcactggcggcggggaagctatccacgcggatgcggcttttggtttgttgatcgaaaatgatgtgatacaggtcatcgccatcgtgccagatgcggaactccgcgcgcatccggtaatgactgaccgggctgcgaaacacttccggaaccaggtcagaaaacggtgccatcatactttgcaaacgtaccactttttcggctaactgcgcttcatactgttctgttggaaggtgttcgggggtcatgatgtatcctgaaaaattaaagtacgcggcgattgtagggattgctcatcagatgtccagatcttgatgaattcctatttgtgagctacgtctggacagtaacttgttacaacctgtagcatccacttgccggtcctgtgagttaatagggaatccagtgcgaatctggagctgacgcgcagcggtaaggaaaggtgcgatgattgcgttatgcggacactgccattcggtgggaagtcatcatctcttagtatcttagatacccctccaagcccgaagacctgccggccaacgtcgcatctggttctcatcatcgcgtaatattgatgaaacctgcggcatccttcttctattgtggatgctttacaatgattaaaaaagctagcctgctgacggcgtgttccgtcacggcattttccgcttgggcacaggataccagcccggatactctcgtcgttactgctaaccgttttgaacagccgcgcagcactgtgcttgcaccaaccaccgttgtgacccgtcaggatatcgaccgctggcagagcaccagcgtcaatgatgtgctgcgccgtcttccgggcgtcgatatcacccaaaacggcggtagtggtcagctcagttctatttttattcgcggtacaaatgccagtcatgtgttggtgttaattgatggcgtacgcctgaatctggcgggggtgagtggttctgccgaccttagccagttccctattgcgcttgtccagcgtgttgaatatatccgtgggccgcgctccgctgtttatggttccgatgcaataggcggggtggtgaatatcatcacgacgcgcgatgaacccggaacggaaattagtgcagggtggggaagcaatagttatcagaactatgatgtctctacgcagcaacaactgggggataagacacgggtaacgctgttgggcgattatgcccatactcatggttatgatgttgttgcctatggtaataccggaacgcaagcgcagacagataacgatggttttttaagtaaaacgctttatggcgcgctggagcataactttactgatgcctggagcggctttgtgcgcggctatggctatgataaccgtaccaattatgacgcgtattattctcccggtagtccgttgctcgatacccgtaaactctatagccaaagttgggacgccgggctgcgctataacggcgaactgattaaaagtcaactcattaccagctatagccatagcaaagattacaactacgatccccattatggtcgttatgatagcagcgcgacgctcgatgagatgaagcaatacaccgtccagtgggcaaacaatgtcatcgttggtcacggtagtattggtgcgggtgtcgactggcagaaacagactacgacgccgggtacaggttatgttgaggatggatatgatcaacgtaataccggcatctatctgaccgggctgcaacaagtcggcgattttacctttgaaggcgcagcacgcagtgacgataacagtcagtttggtcgtcatggaacctggcaaaccagcgccggttgggaattcatcgaaggttatcgcttcattgcttcctacgggacatcttataaggcaccaaatctggggcaactgtatggcttctacggaaatccgaatctggacccggagaaaagcaaacagtgggaaggcgcgtttgaaggcttaaccgctggggtgaactggcgtatttccggatatcgtaacgatgtcagtgacttgatcgattatgatgatcacaccctgaaatattacaacgaagggaaagcgcggattaagggcgtcgaggcgaccgccaattttgataccggaccactgacgcatactgtgagttatgattatgtcgatgcgcgcaatgcgattaccgacacgccgttgttacgccgtgctaaacagcaggtgaaataccagctcgactggcagttgtatgacttcgactggggtattacttatcagtatttaggcactcgctatgataaggattacagttcttatccttatcaaaccgttaaaatgggcggtgtgagcttgtgggatcttgcggttgcgtatccggtcacctctcacctgacagttcgtggtaaaatagccaacctgttcgacaaagattatgagacagtctatggctaccaaactgcaggacgggaatacaccttgtctggcagctacaccttctgaaccacgtcccaccgtgctggtgtttgactccggcgtcggtgggttgagcgtctatgacgagatccggcatctcttaccggatctccattacatttatgctttcgataacgtcgctttcccgtatggcgaaaaaagcgaagcgtttattgttgagcgagtggtggcaattgtcaccgcggtgcaagaacgttatccccttgcgctggctgtggtcgcttgcaacactgccagtaccgttagtcttcctgcattacgcgaaaagttcgacttcccggttgttggtgtcgtgccggcgattaaacctgctgcacgtctgacggcaaatggcattgtcggattactggcaacccgcggaacagttaaacgttcttatactcatgagctgatcgcgcgtttcgctaatgaatgccagatagaaatgctgggcagcgcagagatggttgagttggctgaagcgaagctacatggcgaagatgtttctctggatgcactaaaacgtatcctacgcccgtggttaagaatgaaagagccgccagataccgttgtattgggttgcacccatttccctctactacaagaagaactgttacaagtgctgccagagggaacccggctggtggattctggcgcagcgattgctcgccgaacggcctggttgttagaacatgaagccccggatgcaaaatctgccgatgcgaatattgccttttgtatggcaatgacgccaggagctgaacaattattgcccgttttacagcgttacggcttcgaaacgctcgaaaaactggcagttttaggctgatttggttgaatgttgcgcggtcagaaaattattttaaatttcctcttgtcaggccggaataactccctataatgcgccaccactgacacggaacaacggcaaacacgccgccgggtcagcggggttctcctgagaactccggcagagaaagcaaaaataaatgcttgactctgtagcgggaaggcgtattatgcacaccccgcgccgctgagaaaaagcgaagcggcactgctctttaacaatttatcagacaatctgtgtgggcactcgaagatacggattcttaacgtcgcaagacgaaaaatgaataccaagtctcaagagtgaacacgtaattcattacgaagtttaattctttgagcgtcaaacttttaaattgaagagtttgatcatggctcagattgaacgctggcggcaggcctaacacatgcaagtcgaacggtaacaggaagaagcttgcttctttgctgacgagtggcggacgggtgagtaatgtctgggaaactgcctgatggagggggataactactggaaacggtagctaataccgcataacgtcgcaagaccaaagagggggaccttcgggcctcttgccatcggatgtgcccagatgggattagctagtaggtggggtaacggctcacctaggcgacgatccctagctggtctgagaggatgaccagccacactggaactgagacacggtccagactcctacgggaggcagcagtggggaatattgcacaatgggcgcaagcctgatgcagccatgccgcgtgtatgaagaaggccttcgggttgtaaagtactttcagcggggaggaagggagtaaagttaatacctttgctcattgacgttacccgcagaagaagcaccggctaactccgtgccagcagccgcggtaatacggagggtgcaagcgttaatcggaattactgggcgtaaagcgcacgcaggcggtttgttaagtcagatgtgaaatccccgggctcaacctgggaactgcatctgatactggcaagcttgagtctcgtagaggggggtagaattccaggtgtagcggtgaaatgcgtagagatctggaggaataccggtggcgaaggcggccccctggacgaagactgacgctcaggtgcgaaagcgtggggagcaaacaggattagataccctggtagtccacgccgtaaacgatgtcgacttggaggttgtgcccttgaggcgtggcttccggagctaacgcgttaagtcgaccgcctggggagtacggccgcaaggttaaaactcaaatgaattgacgggggcccgcacaagcggtggagcatgtggtttaattcgatgcaacgcgaagaaccttacctggtcttgacatccacggaagttttcagagatgagaatgtgccttcgggaaccgtgagacaggtgctgcatggctgtcgtcagctcgtgttgtgaaatgttgggttaagtcccgcaacgagcgcaacccttatcctttgttgccagcggtccggccgggaactcaaaggagactgccagtgataaactggaggaaggtggggatgacgtcaagtcatcatggcccttacgaccagggctacacacgtgctacaatggcgcatacaaagagaagcgacctcgcgagagcaagcggacctcataaagtgcgtcgtagtccggattggagtctgcaactcgactccatgaagtcggaatcgctagtaatcgtggatcagaatgccacggtgaatacgttcccgggccttgtacacaccgcccgtcacaccatgggagtgggttgcaaaagaagtaggtagcttaaccttcgggagggcgcttaccactttgtgattcatgactggggtgaagtcgtaacaaggtaaccgtaggggaacctgcggttggatcacctccttaccttaaagaagcgtactttgtagtgctcacacagattgtctgatagaaagtgaaaagcaaggcgtttacgcgttgggagtgaggctgaagagaataaggccgttcgctttctattaatgaaagctcaccctacacgaaaatatcacgcaacgcgtgataagcaattttcgtgtccccttcgtctagaggcccaggacaccgccctttcacggcggtaacaggggttcgaatcccctaggggacgccacttgctggtttgtgagtgaaagtcgccgaccttaatatctcaaaactcatcttcgggtgatgtttgagatatttgctctttaaaaatctggatcaagctgaaaattgaaacactgaacaacgagagttgttcgtgagtctctcaaattttcgcaacacgatgatgaatcgaaagaaacatcttcgggttgtgaggttaagcgactaagcgtacacggtggatgccctggcagtcagaggcgatgaaggacgtgctaatctgcgataagcgtcggtaaggtgatatgaaccgttataaccggcgatttccgaatggggaaacccagtgtgtttcgacacactatcattaactgaatccataggttaatgaggcgaaccgggggaactgaaacatctaagtaccccgaggaaaagaaatcaaccgagattcccccagtagcggcgagcgaacggggagcagcccagagcctgaatcagtgtgtgtgttagtggaagcgtctggaaaggcgcgcgatacagggtgacagccccgtacacaaaaatgcacatgctgtgagctcgatgagtagggcgggacacgtggtatcctgtctgaatatggggggaccatcctccaaggctaaatactcctgactgaccgatagtgaaccagtaccgtgagggaaaggcgaaaagaaccccggcgaggggagtgaaaaagaacctgaaaccgtgtacgtacaagcagtgggagcacgcttaggcgtgtgactgcgtaccttttgtataatgggtcagcgacttatattctgtagcaaggttaaccgaataggggagccgaagggaaaccgagtcttaactgggcgttaagttgcagggtatagacccgaaacccggtgatctagccatgggcaggttgaaggttgggtaacactaactggaggaccgaaccgactaatgttgaaaaattagcggatgacttgtggctgggggtgaaaggccaatcaaaccgggagatagctggttctccccgaaagctatttaggtagcgcctcgtgaattcatctccgggggtagagcactgtttcggcaagggggtcatcccgacttaccaacccgatgcaaactgcgaataccggagaatgttatcacgggagacacacggcgggtgctaacgtccgtcgtgaagagggaaacaacccagaccgccagctaaggtcccaaagtcatggttaagtgggaaacgatgtgggaaggcccagacagccaggatgttggcttagaagcagccatcatttaaagaaagcgtaatagctcactggtcgagtcggcctgcgcggaagatgtaacggggctaaaccatgcaccgaagctgcggcagcgacgcttatgcgttgttgggtaggggagcgttctgtaagcctgcgaaggtgtgctgtgaggcatgctggaggtatcagaagtgcgaatgctgacataagtaacgataaagcgggtgaaaagcccgctcgccggaagaccaagggttcctgtccaacgttaatcggggcagggtgagtcgacccctaaggcgaggccgaaaggcgtagtcgatgggaaacaggttaatattcctgtacttggtgttactgcgaaggggggacggagaaggctatgttggccgggcgacggttgtcccggtttaagcgtgtaggctggttttccaggcaaatccggaaaatcaaggctgaggcgtgatgacgaggcactacggtgctgaagcaacaaatgccctgcttccaggaaaagcctctaagcatcaggtaacatcaaatcgtaccccaaaccgacacaggtggtcaggtagagaataccaaggcgcttgagagaactcgggtgaaggaactaggcaaaatggtgccgtaacttcgggagaaggcacgctgatatgtaggtgaggtccctcgcggatggagctgaaatcagtcgaagataccagctggctgcaactgtttattaaaaacacagcactgtgcaaacacgaaagtggacgtatacggtgtgacgcctgcccggtgccggaaggttaattgatggggttagcgcaagcgaagctcttgatcgaagccccggtaaacggcggccgtaactataacggtcctaaggtagcgaaattccttgtcgggtaagttccgacctgcacgaatggcgtaatgatggccaggctgtctccacccgagactcagtgaaattgaactcgctgtgaagatgcagtgtacccgcggcaagacggaaagaccccgtgaacctttactatagcttgacactgaacattgagccttgatgtgtaggataggtgggaggctttgaagtgtggacgccagtctgcatggagccgaccttgaaataccaccctttaatgtttgatgttctaacgttgacccgtaatccgggttgcggacagtgtctggtgggtagtttgactggggcggtctcctcctaaagagtaacggaggagcacgaaggttggctaatcctggtcggacatcaggaggttagtgcaatggcataagccagcttgactgcgagcgtgacggcgcgagcaggtgcgaaagcaggtcatagtgatccggtggttctgaatggaagggccatcgctcaacggataaaaggtactccggggataacaggctgataccgcccaagagttcatatcgacggcggtgtttggcacctcgatgtcggctcatcacatcctggggctgaagtaggtcccaagggtatggctgttcgccatttaaagtggtacgcgagctgggtttagaacgtcgtgagacagttcggtccctatctgccgtgggcgctggagaactgaggggggctgctcctagtacgagaggaccggagtggacgcatcactggtgttcgggttgtcatgccaatggcactgcccggtagctaaatgcggaagagataagtgctgaaagcatctaagcacgaaacttgccccgagatgagttctccctgaccctttaagggtcctgaaggaacgttgaagacgacgacgttgataggccgggtgtgtaagcgcagcgatgcgttgagctaaccggtactaatgaaccgtgaggcttaaccttacaacgccgaagctgttttggcggatgagagaagattttcagcctgatacagattaaatcagaacgcagaagcggtctgataaaacagaatttgcctggcggcagtagcgcggtggtcccacctgaccccatgccgaactcagaagtgaaacgccgtagcgccgatggtagtgtggggtctccccatgcgagagtagggaactgccaggcatcaaataaaacgaaaggctcagtcgaaagactgggcctttcgttttatctgttgtttgtcggtgaacgctctcctgagtaggacaaatccgccgggagcggatttgaacgttgcgaagcaacggcccggagggtggcgggcaggacgcccgccataaactgccaggcatcaaattaagcagaaggccatcctgacggatggcctttttgcgtttctacaaactcttcctgtcgtcatatctacaagccatccccccacagatacggtaaactagcctcgtttttgcatcaggaaagcagctatgaaccactccttaaaaccctggaacacatttggcattgatcataatgctcagcacattgtatgtgccgaagacgaacaacaattactcaatgcctggcagtatgcaaccgcagaaggacaacccgttcttattctgggtgaaggaagtaatgtactttttctggaggactatcgcggcacggtgatcatcaaccggatcaaaggtatcgaaattcatgatgaacctgatgcgtggtatttacatgtaggagccggagaaaactggcatcgtctggtaaaatacactttgcaggaaggtatgcctggtctggaaaatctggcattaattcctggttgtgtcggcagtagtcctatccagaatattggtgcttatggcgtagaattacagcgagtttgcgcttatgttgattctgttgaactggcgacaggcaagcaagtgcgcttaactgccaaagagtgccgttttggctatcgcgacagtatttttaaacatgaataccaggaccgcttcgctattgtagccgtaggtctgcgtctgccaaaagagtggcaacctgtactaacgtatggtgacttaactcgtctggatcctacaacagtaacgccacagcaagtatttaatgcggtgtgtcatatgcgcaccaccaaactccctgatccaaaagtgaatggcaatgccggtagtttcttcaaaaaccctgttgtatctgccgaaacggctaaagcattactgagtcaatttccaacagcaccaaattacccccaggcggatggtagtgtaaaactggcagcaggttggcttatcgatcagtgccagctaaaagggatgcaaataggtggggctgcggtgcaccgtcaacaggcgttagttctcattaatgaagacaatgcaaaaagcgaagatgttgtacagctggcgcatcatgtaagacagaaagttggtgaaaaatttaatgtctggcttgagcctgaagtccgctttattggtgcaagtggtgaagtgagcgcagtggagacaattagttgaaataaagcgcagtggagacaatttcatgaaggataacaccgtgccactgaaattgattgccctgttagcgaacggtgaatttcactctggcgagcagttgggtgaaacgctgggaatgagccgggcggctattaataaacacattcagacactgcgtgactggggcgttgatgtctttaccgttccgggtaaaggatacagcctgcctgagcctatccagttacttaatgctaaacagatattgggtcagctggatggcggtagtgtagccgtgctgccagtgattgactccacgaatcagtaccttcttgatcgtatcggagagcttaaaagcggcgatgcttgcattgcagaataccagcaggctggccgtggtcgccggggtcggaaatggtttagcccttttggcgcaaacttatatttgagcatgttctggcgtctggaacaaggcccggcggcggcgattggtttaagtctggttatcggtatcgtgatggcggaagtattacgcaagctgggtgcagataaagttcgtgttaaatggcctaatgacctctatctgcaggatcgcaagctggcaggcattctggtggagctgactggcaaaactggcgatgcggcgcaaatagtcattggagccgggatcaacatggcaatgcgccgtgttgaagagagtgtcgttaatcaggggtggatcacgctgcaggaagcggggatcaatctcgatcgtaatacgttggcggccatgctaatacgtgaattacgtgctgcgttggaactcttcgaacaagaaggattggcaccttatctgagccgctgggaaaagctggataattttattaatcgcccagtgaaacttatcattggtgataaagaaatatttggcattagtcgcggaatagacaaacagggggctttattacttgagcaggatggaataataaaaccctggatgggcggtgaaatatccctgcgtagtgcagaaaaataagaaaggggagtattcgctcccctgcaaattatttgcgtagtctgacctcttctaccgcatgattagcacttttcgtcaggattaaactggcgcgctcacgagtaggtagaatattttgctttaagttcagccagttgatctctttccacaatgtcatggcagtcttaatcgcttcttctttagttaatttcgcgtagttatgaaaataggaatccgggtcggtaaaagccccttcgcggaatttcagaaaacggttgatataccatgtctgaagtaagtcttccggtgcatcaacatatatgctaaaatcgacaaaatcagaaacaaatacatgatgtggatcgtgtggataatccatcccgctctgtaagacatttaacccttcaagaattaaaatatcaggctgaacaaccgttttatctccatccgggatcacatcataaataagatgactgtaaacaggtgctgtaacgtttggcacgccggatttgagatcggaaacaaacttcaccaggcgatgcatatcatagctttccgggaagcctttcttcttcatcagaccacgttctttcagaacctgattagggtgaaggaagccatctgtagtgatcagttcaacacgacgatgttccggccaacggcttaatagcgcctgcaatacacgggcggttgtacttttccccaccgcgacactgccagcaatactgataatgtaaggaatgcgttgcccgttggtaccaagaaactgttccagaactgcctgacggcgcagattgctgcttatatagaagttcagcaaacgactcaaaggtaaatagatctcggcaacttcttctaagctgagatcttcattaatacctttgagacgggcgatctcatcttcgcttaacgtcataggtacggaatcacgcagagctgcccactggttgcggtcaaactgtaggtaaggcgtcattaacgtttgctcttttatactcataagcatgtttctggcggtcatagctctatcggcaaagcgatatttgccatggcgcgtcacagttctgttgaatgggttaatgggcaggagggtaacaccagatggggaggaataataagaaaaaatctctgccaggaagctatcgttgaaaagcaatgtgacagatattccatctgataaaaagaattatggtttagcaggagcgcattgttgagcacaatgatgttgaaaaagtgtgctaatctgccctccgttcggctgtttcttcatcgtgtcgcataaaatgtgaccaataaaacaaattatgcaattttttagttgcatgaactcgcatgtctccatagaatgcgcgctacttgatgccgacttagctcagtaggtagagcaactgacttgtaatcagtaggtcaccagttcgattccggtagtcggcaccatcaagtccggtggggttcccgagcggccaaagggagcagactgtaaatctgccgtcacagacttcgaaggttcgaatccttcccccaccaccaatttcggccacgcgatggcgtagcccgagacgataagttcgcttaccggctcgaataaagagagcttctctcgatattcagtgcagaatgaaaatcaggtagccgagttccaggatgcgggcatcgtataatggctattacctcagccttccaagctgatgatgcgggttcgattcccgctgcccgctccaagatgtgctgatatagctcagttggtagagcgcacccttggtaagggtgaggtcggcagttcgaatctgcctatcagcaccacttcttttctcctccctgttttttccttctgtttattgcattcaacaagtcgggcatgttgcctggttgatgtggtgatatcaccgatttatccgtgtcttagagggacaatcgatgtctaaagaaaagtttgaacgtacaaaaccgcacgttaacgtcggtactatcggccacgttgaccatggtaaaacaacgctgaccgctgcaatcactaccgtactggctaaaacctacggcggtgctgctcgcgcattcgaccagatcgataacgcgccggaagaaaaagctcgtggtatcaccatcaacacttctcacgttgaatacgacaccccgacccgtcactacgcacacgtagactgcccggggcacgccgactatgttaaaaacatgatcaccggtgctgcgcagatggacggcgcgatcctggtagttgctgcgactgacggcccgatgccgcagactcgtgagcacatcctgctgggtcgtcaggtaggcgttccgtacatcatcgtgttcctgaacaaatgcgacatggttgatgacgaagagctgctggaactggttgaaatggaagttcgtgaacttctgtctcagtacgacttcccgggcgacgacactccgatcgttcgtggttctgctctgaaagcgctggaaggcgacgcagagtgggaagcgaaaatcctggaactggctggcttcctggattcttacattccggaaccagagcgtgcgattgacaagccgttcctgctgccgatcgaagacgtattctccatctccggtcgtggtaccgttgttaccggtcgtgtagaacgcggtatcatcaaagttggtgaagaagttgaaatcgttggtatcaaagagactcagaagtctacctgtactggcgttgaaatgttccgcaaactgctggacgaaggccgtgctggtgagaacgtaggtgttctgctgcgtggtatcaaacgtgaagaaatcgaacgtggtcaggtactggctaagccgggcaccatcaagccgcacaccaagttcgaatctgaagtgtacattctgtccaaagatgaaggcggccgtcatactccgttcttcaaaggctaccgtccgcagttctacttccgtactactgacgtgactggtaccatcgaactgccggaaggcgtagagatggtaatgccgggcgacaacatcaaaatggttgttaccctgatccacccgatcgcgatggacgacggtctgcgtttcgcaatccgtgaaggcggccgtaccgttggcgcgggcgttgtagcaaaagttctgagctaattgccgataacatttgacgcaatgcgcactaaaagggcatcatttgatgccctttttgcacgctttcgtaccagaacctggctcatcagtgattttctttgtcataatcattgctgagacaggctctgttgagggcgtataatccgaaaagctaatacgcgtttcgatttggtttgcctcgcgatcgcggggtgaaaatgtttgtagaaaacttctgacaggttggtttatgagtgcgaataccgaagctcaaggaagcgggcgcggcctggaagcgatgaagtgggtcgttgtggtggcattgctcctggtggcgattgtcggcaactatctttatcgcgacattatgctgccgctgcgtgcgctggccgtagtaattctgattgctgcagcgggtggtgtcgcgctgttaacgacaaaaggtaaagctaccgttgcttttgcccgtgaagcgcgtaccgaagtccgtaaggtcatttggccgactcgccaggaaacattgcacaccacgctgattgtggctgcggttaccgcagtaatgagtctgatcctgtggggactggatggtattctggttcgcctggtatcctttatcactggcctgaggttctgagatgtctgaagctcctaaaaagcgctggtacgtcgttcaggcgttttccggttttgaaggccgcgtagcaacgagcctgcgtgagcatatcaaattacacaacatggaagatttgtttggtgaagtcatggtaccaaccgaagaagtggttgaaatccgtggcggtcagcgtcgcaaaagcgaacgtaaattcttccctggctacgtcctcgttcagatggtgatgaacgacgcgagctggcacctggtgcgcagcgtaccgcgtgtgatgggcttcatcggcggtacttccgatcgtcctgcgccaatcagcgataaagaagtcgatgcgattatgaaccgcctgcagcaggttggtgataagccgcgtccgaaaacgctgtttgaaccgggtgaaatggtccgtgttaatgatggtccgttcgctgacttcaacggtgttgttgaagaagtggattacgagaaatctcgtctgaaagtgtctgtttctatcttcggtcgtgcgaccccggtagagctggacttcagccaggttgaaaaagcctaacccagcgatcaaaaaagcggcgatttaatcgttgcacaaggcgtgagattggaatacaatttcgcgccttttgtttttatgggccttgcccgtaaaacgattttttatatcacggggagcctctcagaggcgttattacccaacttgaggaatttataatggctaagaaagtacaagcctatgtcaagctgcaggttgcagctggtatggctaacccgagtccgccagtaggtccggctctgggtcagcagggcgtaaacatcatggaattctgcaaagcgttcaacgcaaaaactgattccatcgaaaaaggtctgccgattccggtagtaatcaccgtttacgctgaccgttctttcactttcgttaccaagaccccgccggcagcagttctgctgaaaaaagcggctggtatcaagtctggttccggtaagccgaacaaagacaaagtgggtaaaatttcccgcgctcagctgcaggaaatcgcgcagaccaaagctgccgacatgactggtgccgacattgaagcgatgactcgctccatcgaaggtactgcacgttccatgggcctggtagtggaggactaagaaatggctaaactgaccaagcgcatgcgtgttatccgcgagaaagttgatgcaaccaaacagtacgacatcaacgaagctatcgcactgctgaaagagctggcgactgctaaattcgtagaaagcgtggacgtagctgttaacctcggcatcgacgctcgtaaatctgaccagaacgtacgtggtgcaactgtactgccgcacggtactggccgttccgttcgcgtagccgtatttacccaaggtgcaaacgctgaagctgctaaagctgcaggcgcagaactggtaggtatggaagatctggctgaccagatcaagaaaggcgaaatgaactttgacgttgttattgcttctccggatgcaatgcgcgttgttggccagctgggccaggttctgggtccgcgcggcctgatgccaaacccgaaagtgggtactgtaacaccgaacgttgctgaagcggttaaaaacgctaaagctggccaggttcgttaccgtaacgacaaaaacggcatcatccacaccaccatcggtaaagtggactttgacgctgacaaactgaaagaaaacctggaagctctgctggttgcgctgaaaaaagcaaaaccgactcaggcgaaaggcgtgtacatcaagaaagttagcatctccaccaccatgggtgcaggtgttgcagttgaccaggctggcctgagcgcttctgtaaactaatgcctttacgtgggcggtgattttgtctacaatcttacccccacgtataatgcttaatgcagacgtatatccgagatattcgggttgtggcaaggcggcaactgagtgagtcgccaggagcatagctaactatgtgactggtgcgaatgaaggaagccaacgccgtcacaagctgaatagcgacggatagaaaagatttgttcgttggagcctggcctatccaggcctccgtcgaagaccgcaggagtttcgcaagaaacttaatcccctgcgtagacggtgacagaacgctaagattattcttttatattctggcttgtttctgctcaccgtaattaagacgctctctccgtttggaggagtgaagtgagttccagagattttctctggcaaacatccaggagcaaagctaatggctttaaatcttcaagacaaacaagcgattgttgctgaagtcagcgaagtagccaaaggcgcgctgtctgcagtagttgcggattcccgtggcgtaactgtagataaaatgactgaactgcgtaaagcaggtcgcgaagctggcgtatacatgcgtgttgttcgtaacaccctgctgcgccgtgctgttgaaggtactccgttcgagtgcctgaaagacgcgtttgttggtccgaccctgattgcatactctatggaacacccgggcgctgctgctcgtctgttcaaagagttcgcgaaagcgaatgcaaaatttgaggtcaaagccgctgcctttgaaggtgagctgatcccggcgtctcagatcgaccgcctggcaactctgccgacctacgaagaagcaattgcacgcctgatggcaaccatgaaagaagctagcgctggcaaactggttcgtactctggctgctgtacgcgatgcgaaagaagctgcttaatcgcagttatctttttaacgcattcgcttacgtataaacttattctgatattcaggaacaatttaaatgtctatcactaaagatcaaatcattgaagcagttgcagctatgtctgtaatggacgttgtagaactgatctctgcaatggaagaaaaattcggtgtttccgctgctgctgctgtagctgtagctgctggcccggttgaagctgctgaagaaaaaactgaattcgacgtaattctgaaagctgctggcgctaacaaagttgctgttatcaaagcagtacgtggcgcaactggcctgggtctgaaagaagctaaagacctggtagaatctgcaccggctgctctgaaagaaggcgtgagcaaagacgacgcagaagcactgaaaaaagctctggaagaagctggcgctgaagttgaagttaaataagccaacccttccggttgcagcctgagaaatcaggctgatggctggtgactttttagtcaccagcctttttgcgctgtaaggcgccagtagcgtttcacactgtttgactactgctgtgcctttcaatgcttgtttctatcgacgacttaatatactgcgacaggacgtccgttctgtgtaaatcgcaatgaaatggtttaagcgtgatagcaacaggcattgcggaaagtgttccattttccggtcaacaaaatagtgttgcacaaactgtccgctcaatggacagatgggtcgacttgtcagcgagctgaggaaccctatggtttactcctataccgagaaaaaacgtattcgtaaggattttggtaaacgtccacaagttctggatgtaccttatctcctttctatccagcttgacagctttcagaaatttatcgagcaagatcctgaagggcagtatggtctggaagctgctttccgttccgtattcccgattcagagctacagcggtaattccgagctgcaatacgtcagctaccgccttggcgaaccggtgtttgacgtccaggaatgtcaaatccgtggcgtgacctattccgcaccgctgcgcgttaaactgcgtctggtgatctatgagcgcgaagcgccggaaggcaccgtaaaagacattaaagaacaagaagtctacatgggcgaaattccgctcatgacagacaacggtacctttgttatcaacggtactgagcgtgttatcgtttcccagctgcaccgtagtccgggcgtcttctttgactccgacaaaggtaaaacccactctagcggtaaagtgctgtataacgcgcgtatcatcccttaccgtggttcctggctggacttcgaattcgatccgaaggacaacctgttcgtacgtatcgaccgtcgccgtaaactgcctgcgaccatcattctgcgcgccctgaactacaccacagagcagatcctcgacctgttctttgaaaaagttatctttgaaatccgtgataacaagctgcagatggaactggtgccggaacgcctgcgtggtgaaaccgcatcttttgacatcgaagctaacggtaaagtgtacgtagaaaaaggccgccgtatcactgcgcgccacattcgccagctggaaaaagacgacgtcaaactgatcgaagtcccggttgagtacatcgcaggtaaagtggttgctaaagactatattgatgagtctaccggcgagctgatctgcgcagcgaacatggagctgagcctggatctgctggctaagctgagccagtctggtcacaagcgtatcgaaacgctgttcaccaacgatctggatcacggcccatatatctctgaaaccttacgtgtcgacccaactaacgaccgtctgagcgcactggtagaaatctaccgcatgatgcgccctggcgagccgccgactcgtgaagcagctgaaagcctgttcgagaacctgttcttctccgaagaccgttatgacttgtctgcggttggtcgtatgaagttcaaccgttctctgctgcgcgaagaaatcgaaggttccggtatcctgagcaaagacgacatcattgatgttatgaaaaagctcatcgatatccgtaacggtaaaggcgaagtcgatgatatcgaccacctcggcaaccgtcgtatccgttccgttggcgaaatggcggaaaaccagttccgcgttggcctggtacgtgtagagcgtgcggtgaaagagcgtctgtctctgggcgatctggataccctgatgccacaggatatgatcaacgccaagccgatttccgcagcagtgaaagagttcttcggttccagccagctgtctcagtttatggaccagaacaacccgctgtctgagattacgcacaaacgtcgtatctccgcactcggcccaggcggtctgacccgtgaacgtgcaggcttcgaagttcgagacgtacacccgactcactacggtcgcgtatgtccaatcgaaacccctgaaggtccgaacatcggtctgatcaactctctgtccgtgtacgcacagactaacgaatacggcttccttgagactccgtatcgtaaagtgaccgacggtgttgtaactgacgaaattcactacctgtctgctatcgaagaaggcaactacgttatcgcccaggcgaactccaacttggatgaagaaggccacttcgtagaagacctggtaacttgccgtagcaaaggcgaatccagcttgttcagccgcgaccaggttgactacatggacgtatccacccagcaggtggtatccgtcggtgcgtccctgatcccgttcctggaacacgatgacgccaaccgtgcattgatgggtgcgaacatgcaacgtcaggccgttccgactctgcgcgctgataagccgctggttggtactggtatggaacgtgctgttgccgttgactccggtgtaactgcggtagctaaacgtggtggtgtcgttcagtacgtggatgcttcccgtatcgttatcaaagttaacgaagacgagatgtatccgggtgaagcaggtatcgacatctacaacctgaccaaatacacccgttctaaccagaacacctgtatcaaccagatgccgtgtgtgtctctgggtgaaccggttgaacgtggcgacgtgctggcagacggtccgtccaccgacctcggtgaactggcgcttggtcagaacatgcgcgtagcgttcatgccgtggaatggttacaacttcgaagactccatcctcgtatccgagcgtgttgttcaggaagaccgtttcaccaccatccacattcaggaactggcgtgtgtgtcccgtgacaccaagctgggtccggaagagatcaccgctgacatcccgaacgtgggtgaagctgcgctctccaaactggatgaatccggtatcgtttacattggtgcggaagtgaccggtggcgacattctggttggtaaggtaacgccgaaaggtgaaactcagctgaccccagaagaaaaactgctgcgtgcgatcttcggtgagaaagcctctgacgttaaagactcttctctgcgcgtaccaaacggtgtatccggtacggttatcgacgttcaggtctttactcgcgatggcgtagaaaaagacaaacgtgcgctggaaatcgaagaaatgcagctcaaacaggcgaagaaagacctgtctgaagaactgcagatcctcgaagcgggtctgttcagccgtatccgtgctgtgctggtagccggtggcgttgaagctgagaagctcgacaaactgccgcgcgatcgctggctggagctgggcctgacagacgaagagaaacaaaatcagctggaacagctggctgagcagtatgacgaactgaaacacgagttcgagaagaaactcgaagcgaaacgccgcaaaatcacccagggcgacgatctggcaccgggcgtgctgaagattgttaaggtatatctggcggttaaacgccgtatccagcctggtgacaagatggcaggtcgtcacggtaacaagggtgtaatttctaagatcaacccgatcgaagatatgccttacgatgaaaacggtacgccggtagacatcgtactgaacccgctgggcgtaccgtctcgtatgaacatcggtcagatcctcgaaacccacctgggtatggctgcgaaaggtatcggcgacaagatcaacgccatgctgaaacagcagcaagaagtcgcgaaactgcgcgaattcatccagcgtgcgtacgatctgggcgctgacgttcgtcagaaagttgacctgagtaccttcagcgatgaagaagttatgcgtctggctgaaaacctgcgcaaaggtatgccaatcgcaacgccggtgttcgacggtgcgaaagaagcagaaattaaagagctgctgaaacttggcgacctgccgacttccggtcagatccgcctgtacgatggtcgcactggtgaacagttcgagcgtccggtaaccgttggttacatgtacatgctgaaactgaaccacctggtcgacgacaagatgcacgcgcgttccaccggttcttacagcctggttactcagcagccgctgggtggtaaggcacagttcggtggtcagcgtttcggggagatggaagtgtgggcgctggaagcatacggcgcagcatacaccctgcaggaaatgctcaccgttaagtctgatgacgtgaacggtcgtaccaagatgtataaaaacatcgtggacggcaaccatcagatggagccgggcatgccagaatccttcaacgtattgttgaaagagattcgtagcctgggtatcaacatcgaactggaagacgagtaattctcgctcaaacaggtcactgctgtcgggttaaaacccggcagcggattgtgctaactccgacgggagcaaatccgtgaaagatttattaaagtttctgaaagcgcagactaaaaccgaagagtttgatgcgatcaaaattgctctggctagcccagacatgatccgtagttggtctttcggtgaagttaaaaagccggaaaccatcaactaccgtacgttcaaaccagaacgtgacggccttttctgcgcccgtatctttgggccggtaaaagattacgagtgcctgtgcggtaagtacaagcgcctgaaacaccgtggcgtcatctgtgagaagtgcggcgttgaagtgacccagactaaagtacgccgtgagcgtatgggccacatcgaactggcttccccgactgcgcacatctggttcctgaaaagcctgccgtcccgtatcggtctgctgctcgatatgccgctgcgcgatatcgaacgcgtactgtactttgaatcctatgtggttatcgaaggcggtatgaccaacctggaacgtcagcagatcctgactgaagagcagtatctggacgcgctggaagagttcggtgacgaattcgacgcgaagatgggggcggaagcaatccaggctctgctgaagagcatggatctggagcaagagtgcgaacagctgcgtgaagagctgaacgaaaccaactccgaaaccaagcgtaaaaagctgaccaagcgtatcaaactgctggaagcgttcgttcagtctggtaacaaaccagagtggatgatcctgaccgttctgccggtactgccgccagatctgcgtccgctggttccgctggatggtggtcgtttcgcgacttctgacctgaacgatctgtatcgtcgcgtcattaaccgtaacaaccgtctgaaacgtctgctggatctggctgcgccggacatcatcgtacgtaacgaaaaacgtatgctgcaggaagcggtagacgccctgctggataacggtcgtcgcggtcgtgcgatcaccggttctaacaagcgtcctctgaaatctttggccgacatgatcaaaggtaaacagggtcgtttccgtcagaacctgctcggtaagcgtgttgactactccggtcgttctgtaatcaccgtaggtccatacctgcgtctgcatcagtgcggtctgccgaagaaaatggcactggagctgttcaaaccgttcatctacggcaagctggaactgcgtggtcttgctaccaccattaaagctgcgaagaaaatggttgagcgcgaagaagctgtcgtttgggatatcctggacgaagttatccgcgaacacccggtactgctgaaccgtgcaccgactctgcaccgtctgggtatccaggcatttgaaccggtactgatcgaaggtaaagctatccagctgcacccgctggtttgtgcggcatataacgccgacttcgatggtgaccagatggctgttcacgtaccgctgacgctggaagcccagctggaagcgcgtgcgctgatgatgtctaccaacaacatcctgtccccggcgaacggcgaaccaatcatcgttccgtctcaggacgttgtactgggtctgtactacatgacccgtgactgtgttaacgccaaaggcgaaggcatggtgctgactggcccgaaagaagcagaacgtctgtatcgctctggtctggcttctctgcatgcgcgcgttaaagtgcgtatcaccgagtatgaaaaagatgctaacggtgaattagtagcgaaaaccagcctgaaagacacgactgttggccgtgccattctgtggatgattgtaccgaaaggtctgccttactccatcgtcaaccaggcgctgggtaaaaaagcaatctccaaaatgctgaacacctgctaccgcattctcggtctgaaaccgaccgttatttttgcggaccagatcatgtacaccggcttcgcctatgcagcgcgttctggtgcatctgttggtatcgatgacatggtcatcccggagaagaaacacgaaatcatctccgaggcagaagcagaagttgctgaaattcaggagcagttccagtctggtctggtaactgcgggcgaacgctacaacaaagttatcgatatctgggctgcggcgaacgatcgtgtatccaaagcgatgatggataacctgcaaactgaaaccgtgattaaccgtgacggtcaggaagagaagcaggtttccttcaacagcatctacatgatggccgactccggtgcgcgtggttctgcggcacagattcgtcagcttgctggtatgcgtggtctgatggcgaagccggatggctccatcatcgaaacgccaatcaccgcgaacttccgtgaaggtctgaacgtactccagtacttcatctccacccacggtgctcgtaaaggtctggcggataccgcactgaaaactgcgaactccggttacctgactcgtcgtctggttgacgtggcgcaggacctggtggttaccgaagacgattgtggtacccatgaaggtatcatgatgactccggttatcgagggtggtgacgttaaagagccgctgcgcgatcgcgtactgggtcgtgtaactgctgaagacgttctgaagccgggtactgctgatatcctcgttccgcgcaacacgctgctgcacgaacagtggtgtgacctgctggaagagaactctgtcgacgcggttaaagtacgttctgttgtatcttgtgacaccgactttggtgtatgtgcgcactgctacggtcgtgacctggcgcgtggccacatcatcaacaagggtgaagcaatcggtgttatcgcggcacagtccatcggtgaaccgggtacacagctgaccatgcgtacgttccacatcggtggtgcggcatctcgtgcggctgctgaatccagcatccaagtgaaaaacaaaggtagcatcaagctcagcaacgtgaagagcgttgtgaactccagcggtaaactggttatcacttcccgtaatactgaactgaaactgatcgacgaattcggtcgtactaaagaaagctacaaagtaccttacggtgcggtactggcgaaaggcgatggcgaacaggttgctggcggcgaaaccgttgcaaactgggacccgcacaccatgccggttatcaccgaagtaagcggttttgtacgctttactgacatgatcgacggccagaccattacgcgtcagaccgacgaactgaccggtctgtctagcctggtggttctggattccgcagaacgtaccgcaggtggtaaagatctgcgtccggcactgaaaatcgttgatgctcagggtaacgacgttctgatcccaggtaccgatatgccagcgcagtacttcctgccgggtaaagcgattgttcagctggaagatggcgtacagatcagctctggtgacaccctggcgcgtattccgcaggaatccggcggtaccaaggacatcaccggtggtctgccgcgcgttgcggacctgttcgaagcacgtcgtccgaaagagccggcaatcctggctgaaatcagcggtatcgtttccttcggtaaagaaaccaaaggtaaacgtcgtctggttatcaccccggtagacggtagcgatccgtacgaagagatgattccgaaatggcgtcagctcaacgtgttcgaaggtgaacgtgtagaacgtggtgacgtaatttccgacggtccggaagcgccgcacgacattctgcgtctgcgtggtgttcatgctgttactcgttacatcgttaacgaagtacaggacgtataccgtctgcagggcgttaagattaacgataaacacatcgaagttatcgttcgtcagatgctgcgtaaagctaccatcgttaacgcgggtagctccgacttcctggaaggcgaacaggttgaatactctcgcgtcaagatcgcaaaccgcgaactggaagcgaacggcaaagtgggtgcaacttactcccgcgatctgctgggtatcaccaaagcgtctctggcaaccgagtccttcatctccgcggcaagcttccaggagaccactcgcgtgctgaccgaagcagccgttgcgggcaaacgcgacgaactgcgcggcctgaaagagaacgttatcgtgggtcgtctgatcccggcaggtaccggttacgcgtaccaccaggatcgtatgcgtcgccgtgctgcgggtgaagctccggctgcaccgcaggtgactgcagaagacgcatctgccagcctggcagaactgctgaacgcaggtctgggcggttctgataacgagtaatcgttaatccgcaaataacgtaaaaacccgcttcggcgggtttttttatggggggagtttagggaaagagcatttgtcagaatatttaaggaatttctgaatactcataatcaatgtagagatgactaatatcctgaaactgactgaactaattgagtcaaactcggcaaggattcgatactattcctgtgtaactttcttaaggaacgagaatgaaacaggaagtggaaaagtggcgaccttttggacatccggatggtgatattcgtgatttaagttttcttgatgctcatcaggctgtctacgttcagcatcatgagggcaaagagcctttagagtatcgcttttgggttacctactctcttcactgcttcacaaaagattatgaacatcagacgaacgaagaaaaacaaagcttaatgtaccacgcgcctaaagaatctcgtcccttctgccagcaccgttataacttagcgcgcacacacttaaaaagaactattttggcgctgccagaaagcaacgttattcatgccgggtatggtagctatgccgtgattgaggtggacttagacggaggagataaggcattttactttgttgcgttcagggctttcagggaaaagaaaaaactccgtttgcatgtaactagcgcttatcccatttctgaaaaacagaaaggtaaaagtgtgaaatttttcaccattgcctacaacttattgagaaataagcagcttcctcagcccagtaaataacaaaacccaccttaaggtgggtttcgccagagaattatctctggtattcagaacgccattaccggactttgccttgaccttgcgataatcgcaggttgcgggatgtctgaatttcttcagtctgctgcatcctggaagatgagaacatgtgttcttattttcgtctctatcatagttgagtatttactctcttacaatcagatctctttcattgctcaacaggcgatggcttcagactttgcattacggaatttttaagaaaggcagggcgaaacgaggaagaagcttttcgccctggacaacattcctgctgacggcactaccataaaaaaacacaacgctttcaacaaccttgcgtttttcatcttccgtagcggctcggaataaatttacgttcttacattccgtctcatagtctttggctggcgcgtcccagatagctgtcccagtctttccataccggctgcaaaccctgagcggttaacgcggcagcaaccgcttccggtctgcgatcgtcgtgcggactgaactgttccaactcggggtgattatcggcatagccacctggctgcgttttgctgaaggcgctgacgttattgatcgccagcggaataacgcgatcgcgaaaccacggactttcccgcgtggagagactcagttcaatctccggtgcaagcagtcggaaggcgcagatggtttgcactaactggcgttcatccataatgctcgcaggctcaatgccgccagtacacgggcgcaggcgcggaaaggagacagagtaacggctttgccagtaatgctgttgcagccatagcaaatgttcggcaaccatatagctgtcaacgcgccagttgtcggaaaggccaattagcgcgccgaggcctatcttatcaatccccgcacgccccagccgatccggcgtttccagccgccagaagaagtcctgttttttgcctttcagatgatggcgggcataagtcgcctcgtgatatgtctcctgataaaccatcacgccatccagaccaagttgctttaactcggcgtattccgtctccgccagcggttgcacttccatctgtagactagagaactgttcacgaagggcagggagatgacgacgaaagtaatccatccccactttcgcctgatgttcaccagtgactaacagcagatgttcaaagcccatctcccgtatagcggcactttccctggcaatatccgcttcatccagcgttttgcgcttgatgcgattactcatggaaaatccacagtacgtgcagtcgttagcgcaaagattggaaagataaagcgggacgtagaaactaactgtgttgccaaatcgctgacgggtcagacgctgcgcccgttgggccagttgttccagatagccactggcggcagggcttaacagcgccatcatgtcgtcgcgggtgagttggctggcatttagcgcccgctctacgtcagcagccgttttgccgttgatacgcaggcggatgtcgtcccagtccagttgtcgccagcgatcgctgaaggttttcatgcgcttgcctccagaaatccggtcagcgggctggtggcatgagcaaaataactgcggctgcccggtccggactgacgtgccagtaggcctgcttctaccgccagacgaaatgccttcgccatgttgacgggatcgtccgcgacggcaatcgccgtattcactaacaccgcgtcggcccccatttccagcgcctgcgcggcatggctgggaacgccgatgccagcatcgacaaccaccggcactgtggcctgctggataataatctccagcatggcgcgggtttccagtccctgattgctgccaatcggcgcgccgagcggcatcaccgctgcacagccgacttcttccagacgtttacacaataccggatcggccccgcagtaaggcagcacgacaaatccctgttgtaccagcgtttcggcggctttcagggtttcgatgggatcgggcaacagccagcgggcgtcagggtgaatctctaattttaaccagtttgtgcctaacgcttcacgagccagatgggcggcgaaaatggcttcttccgctgttttcgccccggatgtatttggcagcagggtcacacccgccgcgataagcggttcgaggatagcgtcgttgtgctggcgcaagtcgacacgtttcatcgccagtgtcaccagctggctgccggaagcgcggatcgcctccaccatcagttgactagaagcgaatttccctgtgccggtaaacagatgactatcaaacgttttgtccgcaatacgtaacatttcaaccccctgcaataacctgaaaaagcaggatctggtcgccatcctgcacgatatgttgcgcccactgctcacgcgggacgatttgctgattaatcgccagagccgcgcccgcttgtcgttggtcgagttgctccagtagttcgtgaacagtttgcccggcggcgcactgcatcgcttgatcgttaaacaggatctgcattgcttcctccgcataccgggcaaccactggcgcggcgcaacgccaggctgcgccactggctgcttttaccgtcgaacagtcggagttctcccgcaggtgtctctataccgcttaataacttaatggcttccagtgcctgcaaagtgcccataaccccgaccaccgggccaaccacgcccgccgtgcggcagttgcgttctggctcctggttatctggccacaggcagcggtaacacccctgctcccagggcggcgtcagtaccatcaactgaccgccaaatccgaccgcgctggcggtgataagcggcgtgttgagtgccacgcaggcggcattaatctcctggcgagtcgccatattgtcggtacagtcgagcaccacatcggcccgtgcaaccgcatcttttaacgcctcacccgttaaccgttgttgtaatgctgtcagttgaatgtcgggattcaactgtgtcagtcgctgttggctgacctggcttttcgggcgatcgatatcttcagtggtaaagaggatttgtcgttgcagattgcttaaatgcacatcgtcgtcatctgccagtaccagcgtcccgacgccagcgcccgccaggtacagcgcagcaggtgtacccagcccgcccagaccgataatcagcacctggctgtcgagcagtttttgctgcccgtccagagcgatatcgtcgagcaggatttggcggctataacgcataaagtcacggtcattcatcgccaactcctgcaatttccagcaactgtgccgttgccaaacgccagtctgcggcttgagtaatggcgctgacgacggcgatactgccgacacccgttgctatcaccgcaggcgcgcgtgccagactgataccgccaatcgccacggtgggataatccgccagtcgctcaacatgccgtgccagctgttccagcccctgcggtgcagaaggcatctgtttggtttgcgtcgggaacacatgtcccagcgcgatataagaggggcgtgctgccagcgcgacgtcgatttccatatcgtcatgtgtgctaacgcccagccgcaggcctgccgcgcggatggcattgagatcggtggcttgcaaatcttcctgccccaaatggacgccatacgcctgatgcttgatcgccagccgccagtaatcgttgataaacaatcgcgcgttatagcggcggcccagcgcaattgccgccacgacatcggcttccacctcttcatcgcgccgatctttgatgcgtagctggagagtacgtacgcctgcatccaacagacgttcgatccactgtacgctgtccaccaccgggtacagtccactacgaaaaggtacaggaggaaaatcaggctgatacatcacgcttcctccttacgcaggtagatttctccgcctctggcacggaagttctcgctcatatccgccattcccatttcaatagtttgcgtggcggcgtaatcacgcacttcctggctgattttcatgctgcagaatttcggcccacacatggagcaaaaatgggcgactttaccactctcttgcggcagggtttcatcgtgataagcgcgggcggtaaacgggtcgagggccagattaaactggtcttcccagcgaaattcgaagcgggctttgctcatggcgttatcgcgaatttgcgcgcccggatgccctttcgccaggtcagcggcgtgggcagcaatcttataggtgataagcccctgcttaacatcttctttattgggcagacccagatgctcttttggcgttacgtaacagagcatcgcgcagccaaaccagccaatcatcgccgcaccaatcccgctcgtgaagtggtcatagcccggcgcaatatcggtagttagcggccccagagtgtaaaacggcgcttcgtggcagtgctctaactcctcggtcatattgcggcggatcatctgcatcggcacgtggcctgggccttcaatcatcacctgcacgtcatattcccaggcaattttggtcagttcgcccagcgtatgcagctcggcaaactgcgcttcatcgttggcgtcctgaatagaaccggggcgcagaccgtcgcccaggctcaggctaacgtcataagcggcacagatttcacaaatttcgcggaagtgttgatagaggaaattttcctgatgatgggagaggcaccatttcgccataatgctaccgccgcgagagacgataccggtcaggcgtttcgcggtcatcggcacatagcgcagcagtacgcccgcatggatagtgaagtaatccacaccttgctcggcctgttccagcagcgtgtcgcggaacgcttcccaggtaagatcttcggcgatcccgttaaccttctccagcgcctggtagatcggcactgtaccgatcggcaccgggctgttacgcaaaatccactcgcgggtttcgtgaatatagcgaccggtggagagatccatcaccgtatccgctccccagcgcgtggaccataccagcttttccacttcttcttcgatggaagaggtgaccgcgctgttgccgatattggcgttaacttttaccaggaaattgcgaccaataatcatcggctcgctttccggatgattaatgttggccgggataatcgcacgtccggcagcaacttcatcacggacaaattccgcagtgatattttccggcagatgtgcgccaaagctcattcccggatgctggtggcgtaaaacctcgctacggatgcgctcgcggcccatattctcgcggatggcgatgaattccatttccggcgtgatgatgccctggcgggcgtagtgcagttgggtgacacggcgtcctgctttggcgcgttttggtgttagtacgccgctaaaacgcagttcgtcgaggccatcatctgccagccgcgctttagtgtaatcggaactgcgcacggtaagttcttcggtatcgccgcgcgcatcgatccacggctggcgtagttttgccagcccttgctgcacgttaatggcaatctgcggatcaccatacgggccggaggtgtcgtagaccggaatcgcttcgttttcttcgtactgcggctgttctttgctaccgccaattagcgtcgggctaagctggatctcacgcatcggcacgcgcacgccggggtgtgtgccagtgatataaatgcgtttactgttgggaaaggcggtgccttccagggtgtcgataaaatgttgggcccgggcgcgttgttcgcggcgggtcagttttgttgcagacatagctcattccaaaaagttaaggacgtggcttgtcagacgacggatgaagcaagagacgatcgccgcaggggcgatgcgatagcagattaactcttgttcccttcgcaggtattagcctgatcaggttccgcggatcccgaataaacggtctcagccagttaaggcactccgacaagaaattagccccgcaaatggggcattgaatgtaaattacgcgttaacagcgcagaactcaagcaggatgtttgacgcgggcggcgtcaagcaccagcagaatcagcttatcttccagcacaaagcgcgcttccagcgcctcgccgatgtcagataaaacctgttgaaactcaaggtaattatcatgatcgatggcggtttccagactggaatcgtagtaatccataatctgttgagtattggcttcgagttgcggccaaatcttcgcggcgcgcgcgagttgcccgttgccttccagcttatgaagaatgcgctcataaatactgaaatgtccggcagacaagtaatcgaccaggctctgacaaaaatcatcaagggctttttcgtttagcctcatgtagctttctttgccaggcttaatgccaaccagattgtagtaagccacgagcagatgcttacgtacatgtagccagcgatcaaccagtttgttacttcctctgacgcgctccgtcaggttatcgagctggttaagcatgattgactccgcaagtttgtattcaaaaactgctcagtgagaaatgtaaaaaccatgttaaacatgccagtgatgcaaaggtagtgcaagagctatggatcgtataattgaaaaattagatcacggctggtgggtcgtcagccatgaacaaaaattatggttgccgaagggagaattgccatatggcgaagcggcaaatttcgatcttgtgggtcagcgcgcactacaaatcggcgaatggcagggggaacctgtttggttagtacaacagcagcggcgtcacgatatggggagcgtacgtcaggtcattgatctcgatgttgggctgtttcaactggccggacgaggcgtacaactggcggagttttaccgaagccataaatactgtggttactgcgggcatgaaatgtatccgagcaaaaccgaatgggcgatgctgtgcagccattgccgtgagcgttactacccgcaaatcgccccctgcattattgttgccatccgtcgcgatgatagcatcctcctcgcccagcatacccgccatcgtaacggtgtccatacagtacttgccggattcgtcgaagtgggcgaaaccctcgagcaggcagtcgcgcgggaagtgatggaagagagcggaattaaagttaaaaacttgcgttacgtgacttctcagccgtggccgtttcctcagtctttaatgaccgcgtttatggcggaatatgacagcggcgacatcgtgatcgacccgaaagaattgctcgaggcgaactggtatcgctatgacgatttgccgttactcccgccgcccggcaccgtagcgcgccgtctgatagaagatacggtggcgatgtgtcgggcagagtatgagtgatgatacactgaccgcctgacgcactaaggaacagccaaaatgaccgaacttaaaaacgatcgttatctgcgggcgctgctgcgccagcccgttgatgtcactccagtatggatgatgcgccaggcgggtcgctatctaccggaatataaagccacgcgcgcccaggcaggcgattttatgagcctgtgcaaaaacgccgagctggcgtgcgaagtgactttgcaaccgctgcgtcgctacccgctggatgcggcgatcctcttttccgatatcctcaccgtgccggacgcgatggggttagggctctattttgaagccggagaaggtccgcgttttaccagcccagtcacctgcaaagctgacgtcgataaactgccaattccggacccggaagatgaactgggttacgtgatgaacgcggtgcgtaccattcgtcgcgaactgaaaggcgaagtgccgctgattggtttttccggcagcccgtggacgctggcgacctacatggtggaaggcggcagcagcaaagccttcaccgtgatcaaaaaaatgatgtatgccgatccgcaggcgctgcacgctctgctcgataaactggcgaaaagcgtcactttgtatctgaatgcgcagattaaagccggtgctcaggcagtgatgattttcgacacctggggcggcgtgcttaccgggcgcgattatcaacagttcagcctctattacatgcataaaattgttgatggtttactgcgtgaaaacgacggtcgccgcgtaccggtcacgctgtttaccaaaggcggcggacagtggctggaagccatggcagaaaccggttgcgatgcgctgggcctcgactggacaacggacatcgccgatgcgcgccgccgtgtgggcaataaagtcgcgttgcagggtaatatggatccgagcatgctgtacgcgccgcctgcccgcattgaagaagaagtagcgactatacttgcaggtttcggtcacggcgaaggtcatgtctttaaccttggtcacggcattcatcaggatgtgccgccagaacatgctggcgtgttcgtggaggcagtgcatcgactgtctgaacagtatcaccgctaaggagtgattatggatctcgcgagtttacgcgctcaacaaatcgaactggcttcttctgtgatccgcgaggatcgactcgataaagatccaccggatctgatcgccggagccgatgtcgggtttgagcagggcggagaagtgacgcgagcggcgatggtgctgctgaaatatcccagccttgagctggtcgagtataaagttgcccgcatcgccaccaccatgccttacattccaggttttctttccttccgcgaatatcctgcgctgctggcagcgtgggagatgctgagccaaaagccggatttagtgtttgtcgatggtcatgggatcagccatcctcgccgtcttggcgtcgccagccattttggcttattggtggatgtgccgaccattggcgtggcgaaaaaacggctctgcggtaaattcgaaccgctctccagcgaaccgggcgcgctggccccactgatggataaaggcgagcagctggcctgggtctggcgcagcaaagcgcgctgtaacccgttgtttatcgctaccggccatcgggtcagcgtggacagcgcgctggcgtgggtacaacgctgcatgaaaggctatcgtctgccggagccaacgcgctgggcggacgcggtggccagcgaacgtccggcgttcgtgcgctatacagcaaatcagccctaattcaggtaaactgcggataatttccgtatttgagaactcaacatgttacaaaacccaattcatctgcgtctggagcgcctggaaagctggcagcatgtcactttcatggcttgcttatgcgaacgcatgtaccccaattacgccatgttctgccagcaaaccggttttggtgatgggcaaatttaccgtcgcattctcgatctcatctgggaaacgctgaccgttaaagacgcaaaagtaaatttcgacagccaactggagaaatttgaagaagcgattcctagtgccgacgatttcgatctgtacggcgtttatccggcaatcgatgcctgcgtggcgttaagtgaactggtccatagccgtttgagtggtgaaacgctcgaacacgcggtggaagtgagtaagacctccatcacgaccgttgcgatgctggaaatgactcaggctggtcgcgaaatgagcgatgaagagcttaaagaaaacccagctgtagagcaagaatgggacattcagtgggaaatattccgacttttagctgagtgcgaagaacgcgatatcgagctgataaaaggccttagggcagacctgcgtgaggcgggtgagagcaatattggtataatttttcagcaataagaccagaaaacgtgatttaacgcctgatttgtcgtacctggagtcttccctttcgcccccgtctggtctacatttggggggcgaaaaaaagtggctatcggtgcgtgtatgcaggagagtgctattctggcatttccgtcgcactcgatgcttagcaagcgataaacacattgtaaggataacttatgaacaagactcaactgattgatgtaattgcagagaaagcagaactgtccaaaacccaggctaaagctgctctggagtccactctggctgcaattactgagtctctgaaagaaggcgatgctgtacaactggttggtttcggtaccttcaaagtgaaccaccgcgctgagcgtactggccgcaacccgcagaccggtaaagaaatcaaaattgccgcagctaacgtaccggcatttgtttctggcaaggcactgaaagacgcagttaagtaagattgcgtggcagtgaacagttttaacgaaggggtggttagtccccttttgtctttctggcgtcgaagtttgatgctggctggcgctctgcttctcactgcctgtagtcataactctagtcttcctccctttaccgccagtggatttgctgaagaccagggcgcggtacgcatctggcgaaaagacagcggcgataatgtgcatctgcttgccgtgtttagcccgtggcgcagtggcgataccacgacgcgagagtatcgctggcagggcgataacctcacgctcatcaatatcaatgtttacagcaaaccgccggtgaatattcgcgcgcgttttgacgatcgcggtgatctgagctttatgcaacgtgaatccgatggggaaaagcagcagctttctaacgaccaaatcgatttataccgttatcgtgctgatcagatccgccagattagcgatgccttacgtcaggggagagtcgtgctgcgccaggggcgctggcatgcgatggaacagaccgtgaccacctgcgaagggcaaaccattaaacctgatttagatagccaggcgatagcgcatatcgagcgccgccagagccgctcttctgttgatgtcagcgtggcatggctggaagcgcccgaaggtagccaattactgttagtggcaaactctgatttctgtcgctggcaacccaacgagaaaacgttctgatttaccagtggcccatacccatatgaccgccaccaccgcagccgccgtagcccatgcccattccggctccgcgcggaatacccgcttcagccatcgcgatatctcgtttcacccgtaactcatctaagctctgacgcaaattctccatctctttggcgaccgcgttaattttgctgctatccggtgggttcgcggctaacagggcattgtattcataacgcttcgtcaccagttgctgttgcagtgcgctgctttgagcgtaaaagtcattatggattttctgccacgctgtctgttgttcgctggtcaaaggcgcggcattttgctgccacataccgtgtccgccgtgagcaaatgcagatgtgcttcccatcgccattgcactaagcgccatcattaccagggcaattttcgtgttccgtttcatggttaatcctccagtggttgtcttacttcgggtattgcatcttccgtgccaacgatgaaacgctgatatgacgggtaatctggcatgataaacgagtaaaaatgactcgcctgctgcgggtagcgagtcatttttactcattgaaacttaagcctttgtgttacagcgcagggtaagcgctgataaaagatggcatgatttctgctgtcagaaagggatgagcaggcaaagaagaagatgcgttttatgcaacgttctaaagactccttagctaaatggttaagcgcgatcctccccgtggtcattgttgggctggtgggattgtttgcggtaactgtgattcgtgattatgggcgggcaagcgaggcagaccgccaggcattactggaaaaaggtaatgtgcttatccgcgctctggagagcggaagccgcgtagggatggggatgcgaatgcaccatgtacagcaacaggcgcttctggaagagatggcgggacagccgggagtgttgtggttcgcagtcaccgatgcgcagggcatcattattcttcatagcgaccccgataaggtcgggcgtgcgctctatagcccggatgaaatgcagaaattaaagccagaggaaaactcccgctggcggctgcttgggaaaacggaaactacgcctgcacttgaggtctatcgtttgttccagccaatgagtgcgccctggcggcatggaatgcacaatatgccgcgctgtaacggcaaagctgtgccacaagtagatgcacaacaggctatttttatcgccgttgatgccagtgatctggttgcaacccagagtggggaaaagcgcaataccctgattatcctcttcgccctggcgacggtcttgctggcaagcgtattgagtttcttctggtatcgccgctatctgcgcagccgccagcttctacaagatgaaatgaagcgcaaagagaagctggtggcgctggggcatcttgcggcaggcgttgcccacgaaatccgtaacccactttccagcattaaaggactggcgaaatactttgccgagcgcgcgcctgcagggggagaagcgcatcaactggcgcaggtgatggcgaaagaggccgaccgtttaaaccgcgtggtaagcgagttgctggaactggttaagccaacgcatctggctttgcaggcggtggatctcaacacgctgattaaccacagtttacagctggtaagtcaggatgcaaacagccgggagatccagttacgctttaccgccaacgacacattaccggaaattcaggccgacccggacaggctgactcaggtcctgttgaatctctatctcaatgctattcaggcgattggtcagcatggcgtgattagcgtgacggccagcgaaagcggcgcgggcgtgaaaatcagcgttaccgacagcggtaagggaattgcggcagatcagcttgatgccatcttcactccgtacttcaccactaaagccgaaggcaccggattggggctggcggtcgtgcataatattgttgaacaacacggtggtacaattcaggtcgcaagccaggagggaaaaggcagtacgttcaccctctggcttccggtcaatattacgcgtaaggacccacaaggatgacgcacgataatatcgatattctggtggtggatgatgacattagccactgcactattttgcaggctttactgcgcggctggggctataacgtcgcgctggcgaacagcgggcgacaggcgttggagcaggtgcgggaacaggtttttgatcttgtgctttgcgatgtgcgaatggcggagatggacggcatcgccacgctgaaagagatcaaagcgttaaacccggcaattccggtgctgattatgactgcgtactccagcgtcgagacggcggtagaggcactgaaaactggggcgctggattatctcatcaagccgctggatttcgataacctacaggcgacgctggaaaaagcgctcgcgcatacgcacagtattgatgctgaaacacctgcggtgactgccagccagttcggtatggtcggtaaaagcccggcgatgcaacacctgctcagtgaaatcgccctcgtcgcgccaagcgaagccacggtactgatccacggcgattccggcaccggtaaagagctggtcgccagggcgattcacgccagtagcgcacgtagcgaaaaaccgctggtaacgctcaactgtgcggcactcaacgaatccttgctggaatctgaattgttcggtcacgaaaaaggggcgtttactggagccgataaacgccgggaagggcgctttgttgaggcggacggcggcacgctgtttctcgatgaaattggcgatatcagcccgatgatgcaggtgcgtctgctgcgtgcgattcaggagcgcgaagttcagcgtgtcggtagcaaccagattatcagcgttgatgtccggctgattgcggcgacccatcgcgatcttgccgcagaggtgaatgccgggcgttttcgccaggatctctactatcgcctgaatgtggtggcgattgaagtaccaagcctgcggcaacggcgggaagatatccctctgctggctggccattttctgcagcgctttgccgagcgtaatcgcaaggcggtaaaaggttttacgccccaggcgatggatctgttgattcattacgactggccgggaaatattcgtgagctggaaaacgcggtggaacgggcagtggtgctgctgaccggggaatatatttccgaacgcgagctgccgctggcgattgccagtacgccgatcccgctgggacaaagtcaggatattcagccgttggtggaagtggaaaaagaggtgattctggcggcgctggagaaaacgggcggcaacaaaaccgaagccgcccgtcagttagggatcacgcgcaaaacgctattggcaaaactgagccgttaattctgctcgcgttcgatagcgcgccagccgatatctttccggcagaagcagtcgtcccagtggatatcggtcattaaggcataggcgcgtttctgcgcttctgccacggtatgacccagcgcggtgacgcacagtacgcgcccgccgttggtcactacctgctcgtcatccgccagttttgtgcccgcgtggaacactttgccgcctgccacttcttccagcggcaggccgtggatcacgtcaccggtgcggtaatcacccggatatccacccgcagccatcaccacgccgagagaagcgcgttcatcccactcggacgttttctcgtccagtttgctttcacaggccgccaggcagagctcaaccagatcggacttcatgcgcagcataatcggctgggtttccggatcgccaaagcggcagttaaattcaataaccttcggattgccctgtttgtcgatcatcaggcccgcgtagagaaaaccggtgtaggtgttgccttccgccgccatgcctttcacggttggccagataatacgttccatggtgcgctgatgaacgtcatcggttactaccggcgcgggggagtaagcgcccatcccgccggtgtttggtccggtatctttatcgcctacgcgtttgtgatcctggctggtagccatcggcagcacatgctcgccgtccaccatcacgataaagctcgcttcttcgccatcgaggaactcttcgataacgatgcgatgacccgcgtcgccaaaagcgttgcccgccagcatatcgtgaacagccgcttccgcttcttccagcgtcatcgccacgataacgcctttcccggcagccagaccgtccgctttaatgacgattggcgcgcctttctcacgcagatacgccagcgcaggttctacctcggtgaagttctggtattccgccgtagggatcttatggcgggccaggaaatctttggtaaacgctttactgccttccagttgggccgcacctgcggttgggccgaagattttcagcccggcggcgcggaaggtatcgaccacgcctttcaccagcggcgcttccgggccgacgatggtcagatcaatcttttcgttttgtgcgaaatccaacagcgccgggatatcggtcacgccaatagcaacgttttgcagcgcgggttccagtgcagtgcctgcattacccggagcaacaaaaacagtctcaaccagcgggctctgggccgctttccaggccagcgcgtgctcgcgcccgccgttaccaatcactaatactttcatctattgctccattaatggcggaagtggcgcatgtcggtgaagagcatcgcaataccgtgctcgtcggcggcggcaatcacttcgtcatcacggatagaaccgccaggctggattacgcaggtcacgcccgcagcggcggcggcatcaataccgtcgcggaacgggaagaacgcgtcagaagccatgctggaacctttcacttccaggccttcatcggccgctttaataccggcgatttttgcggagtacacgcggctcatctggcccgcgccaatgccgatagtcatattgtttttggcatagacgatagcgttggatttcacaaacttcgccaccttccagcagaacagcgcatcacgcagttcctgttcgctcggctgacgtttggtcaccacgcgcagttcttccgcaccgaccatccccaggtcacgatcctgaaccagcagaccgccgttcacgcgtttgaaatcgaggcccggaacacgctcgccccactgaccgcaggtcagaacgcgtacgttctgtttggcggcggtgattttcagggcttcttcgctggcggacggcgcaataatcacttcgacaaactgacgagaaatgatggcctgtgcggtttccgcatccagctcgcggttaaaggcaatgatgccgccgaatgcggaggttgggtcggttttgtacgcgcgatcgtaagcatcaagaatggaattgccgatagccacgccgcaagggttggcgtgcttcacaatcacacatgccggctcggcgaactctttcacgcactccagcgccgcatcggtatcggcgatgttgttataagagagggctttaccctgaacctgggttgcggtagcaacggaggcttctttcacattctcttctatatagaaggcagcctgctggtggctgttctcgccgtaacgcatatccagcttcttaatgaagttcaggttcagcgtgcgtgggaagcgaccggcggcttctttgctttcaccgtggtaagccggaaccatgctgccgaagtagttggcaatcatgctgtcgtaggcggcagtgtgttcgaaggctttgatggcgaggtcgaaacgggttgcaagcgtcaggcttccttcgttgtcatccatctctttaataatggcgtcatagtcgctgctcttcaccacgattgcgacatctttatggttcttggcggcggagcgcaccatcgttgggccgccgatatcgatgttctcaaccgcatcttccaggctgcaaccttcacgggccacggtctgggcgaacggatacaggttaacaaccaccatatcgataggctggatctgatgttcttccataatggcatcgtcctggccgcgacggcccagaatgccaccatgtactttcggatgcagggtcttcacgcgtccatccatcatctccgggaaaccggtgtaatcggaaacttcggttaccggcagacctttttctgctaacagacgggcagtgccccctgtagacagcagctccacaccgcgtgcggaaagtgcctgggcgaattcgacgataccggctttgtcagaaacactgagcagagcgcggcggactggacgacgttgttgcatggtaaatcccctggatttgactattacagagagcgttagctgaatttttcgcgaaaaactcagctaacgcccctaacggggcatccttatttttcgcccgcattgtaacgaaaacgtttgcgcaacgctcgcgaatttttctctttcaatggtgatcacaattttgactgtggttaccgtgggcaaaatacagaaattacattgatgattgtggataactctgtgcgtaaaaaggtataaagcgggcttttgctggggaatgcagcagtcagtcatttttctgcaatttttctattgcggcctgcggagaactccctataatgcgcctccatcgacacggcggatgtgaatcacttcacacaaacagccggttcggttgaagagaaaaatcctgaaattcagggttgactctgaaagaggaaagcgtaatatacgccacctcgcgacagtgcgctaaagcgcgtcgcaactgctctttaacaatttatcagacaatctgtgtgggcactcgaagatacggattcttaacgtcgcaagacgaaaaatgaataccaagtctcaagagtgaacacgtaattcattacgaagtttaattctttgagcatcaaacttttaaattgaagagtttgatcatggctcagattgaacgctggcggcaggcctaacacatgcaagtcgaacggtaacaggaagaagcttgcttctttgctgacgagtggcggacgggtgagtaatgtctgggaaactgcctgatggagggggataactactggaaacggtagctaataccgcataacgtcgcaagaccaaagagggggaccttcgggcctcttgccatcggatgtgcccagatgggattagctagtaggtggggtaacggctcacctaggcgacgatccctagctggtctgagaggatgaccagccacactggaactgagacacggtccagactcctacgggaggcagcagtggggaatattgcacaatgggcgcaagcctgatgcagccatgccgcgtgtatgaagaaggccttcgggttgtaaagtactttcagcggggaggaagggagtaaagttaatacctttgctcattgacgttacccgcagaagaagcaccggctaactccgtgccagcagccgcggtaatacggagggtgcaagcgttaatcggaattactgggcgtaaagcgcacgcaggcggtttgttaagtcagatgtgaaatccccgggctcaacctgggaactgcatctgatactggcaagcttgagtctcgtagaggggggtagaattccaggtgtagcggtgaaatgcgtagagatctggaggaataccggtggcgaaggcggccccctggacgaagactgacgctcaggtgcgaaagcgtggggagcaaacaggattagataccctggtagtccacgccgtaaacgatgtcgacttggaggttgtgcccttgaggcgtggcttccggagctaacgcgttaagtcgaccgcctggggagtacggccgcaaggttaaaactcaaatgaattgacgggggcccgcacaagcggtggagcatgtggtttaattcgatgcaacgcgaagaaccttacctggtcttgacatccacggaagttttcagagatgagaatgtgccttcgggaaccgtgagacaggtgctgcatggctgtcgtcagctcgtgttgtgaaatgttgggttaagtcccgcaacgagcgcaacccttatcctttgttgccagcggtccggccgggaactcaaaggagactgccagtgataaactggaggaaggtggggatgacgtcaagtcatcatggcccttacgaccagggctacacacgtgctacaatggcgcatacaaagagaagcgacctcgcgagagcaagcggacctcataaagtgcgtcgtagtccggattggagtctgcaactcgactccatgaagtcggaatcgctagtaatcgtggatcagaatgccacggtgaatacgttcccgggccttgtacacaccgcccgtcacaccatgggagtgggttgcaaaagaagtaggtagcttaaccttcgggagggcgcttaccactttgtgattcatgactggggtgaagtcgtaacaaggtaaccgtaggggaacctgcggttggatcacctccttaccttaaagaagcgttctttgcagtgctcacacagattgtctgatagaaagtgaaaagcaaggcgtcttgcgaagcagactgatacgtccccttcgtctagaggcccaggacaccgccctttcacggcggtaacaggggttcgaatcccctaggggacgccacttgctggtttgtgagtgaaagtcacctgccttaatatctcaaaactcatcttcgggtgatgtttgagatatttgctctttaaaaatctggatcaagctgaaaattgaaacactgaacaacgaaagttgttcgtgagtctctcaaattttcgcaacacgatgatgaatcgtaagaaacatcttcgggttgtgaggttaagcgactaagcgtacacggtggatgccctggcagtcagaggcgatgaaggacgtgctaatctgcgataagcgtcggtaaggtgatatgaaccgttataaccggcgatttccgaatggggaaacccagtgtgtttcgacacactatcattaactgaatccataggttaatgaggcgaaccgggggaactgaaacatctaagtaccccgaggaaaagaaatcaaccgagattcccccagtagcggcgagcgaacggggagcagcccagagcctgaatcagtgtgtgtgttagtggaagcgtctggaaaggcgcgcgatacagggtgacagccccgtacacaaaaatgcacatgctgtgagctcgatgagtagggcgggacacgtggtatcctgtctgaatatggggggaccatcctccaaggctaaatactcctgactgaccgatagtgaaccagtaccgtgagggaaaggcgaaaagaaccccggcgaggggagtgaaaaagaacctgaaaccgtgtacgtacaagcagtgggagcacgcttaggcgtgtgactgcgtaccttttgtataatgggtcagcgacttatattctgtagcaaggttaaccgaataggggagccgaagggaaaccgagtcttaactgggcgttaagttgcagggtatagacccgaaacccggtgatctagccatgggcaggttgaaggttgggtaacactaactggaggaccgaaccgactaatgttgaaaaattagcggatgacttgtggctgggggtgaaaggccaatcaaaccgggagatagctggttctccccgaaagctatttaggtagcgcctcgtgaattcatctccgggggtagagcactgtttcggcaagggggtcatcccgacttaccaacccgatgcaaactgcgaataccggagaatgttatcacgggagacacacggcgggtgctaacgtccgtcgtgaagagggaaacaacccagaccgccagctaaggtcccaaagtcatggttaagtgggaaacgatgtgggaaggcccagacagccaggatgttggcttagaagcagccatcatttaaagaaagcgtaatagctcactggtcgagtcggcctgcgcggaagatgtaacggggctaaaccatgcaccgaagctgcggcagcgacgcttatgcgttgttgggtaggggagcgttctgtaagcctgcgaaggtgtgctgtgaggcatgctggaggtatcagaagtgcgaatgctgacataagtaacgataaagcgggtgaaaagcccgctcgccggaagaccaagggttcctgtccaacgttaatcggggcagggtgagtcgacccctaaggcgaggccgaaaggcgtagtcgatgggaaacaggttaatattcctgtacttggtgttactgcgaaggggggacggagaaggctatgttggccgggcgacggttgtcccggtttaagcgtgtaggctggttttccaggcaaatccggaaaatcaaggctgaggcgtgatgacgaggcactacggtgctgaagcaacaaatgccctgcttccaggaaaagcctctaagcatcaggtaacatcaaatcgtaccccaaaccgacacaggtggtcaggtagagaataccaaggcgcttgagagaactcgggtgaaggaactaggcaaaatggtgccgtaacttcgggagaaggcacgctgatatgtaggtgaggtccctcgcggatggagctgaaatcagtcgaagataccagctggctgcaactgtttattaaaaacacagcactgtgcaaacacgaaagtggacgtatacggtgtgacgcctgcccggtgccggaaggttaattgatggggttagcgcaagcgaagctcttgatcgaagccccggtaaacggcggccgtaactataacggtcctaaggtagcgaaattccttgtcgggtaagttccgacctgcacgaatggcgtaatgatggccaggctgtctccacccgagactcagtgaaattgaactcgctgtgaagatgcagtgtacccgcggcaagacggaaagaccccgtgaacctttactatagcttgacactgaacattgagccttgatgtgtaggataggtgggaggctttgaagtgtggacgccagtctgcatggagccgaccttgaaataccaccctttaatgtttgatgttctaacgttgacccgtaatccgggttgcggacagtgtctggtgggtagtttgactggggcggtctcctcctaaagagtaacggaggagcacgaaggttggctaatcctggtcggacatcaggaggttagtgcaatggcataagccagcttgactgcgagcgtgacggcgcgagcaggtgcgaaagcaggtcatagtgatccggtggttctgaatggaagggccatcgctcaacggataaaaggtactccggggataacaggctgataccgcccaagagttcatatcgacggcggtgtttggcacctcgatgtcggctcatcacatcctggggctgaagtaggtcccaagggtatggctgttcgccatttaaagtggtacgcgagctgggtttagaacgtcgtgagacagttcggtccctatctgccgtgggcgctggagaactgaggggggctgctcctagtacgagaggaccggagtggacgcatcactggtgttcgggttgtcatgccaatggcactgcccggtagctaaatgcggaagagataagtgctgaaagcatctaagcacgaaacttgccccgagatgagttctccctgactccttgagagtcctgaaggaacgttgaagacgacgacgttgataggccgggtgtgtaagcgcagcgatgcgttgagctaaccggtactaatgaaccgtgaggcttaaccttacaacgccgaaggtgttttggcggattgagagaagattttcagcctgatacagattaaatcagaacgcagaagcggtctgataaaacagaatttgcctggcggcagtagcgcggtggtcccacctgaccccatgccgaactcagaagtgaaacgccgtagcgccgatggtagtgtggggtctccccatgcgagagtagggaactgccaggcatcaaattagaaaaaccccggtccataaggccggggttttttgcatatcaattatttgcatgatgaagggaatctcatgagtgttctgtatatccaaattcgtcgtaatcaaattactgttcgcgatcttgaaagcaaacgtgaagtgagtggagacgctgccttcagtaaccagcgcctgttaatcgccaatttctttgttgcagaaaaagttctgcaagatcttgttctgcaactccacccacgtagtacctggcattcttttttgccagcaaaacgtatggatattgttgtgagcgcactggaaatgaatgagggcggtttgagtcaggttgaggaacgcattctccatgaagtggtcgctggggcaacgttaatgaaatatcgccagttccacatccatgcgcaaagtgcggtactcagtgatagtgcggtcatggcaatgcttaagcagaaataatcgtgtcaccattggtgggtactaaacctgaagttcagcccaccgggatgagaaaaaatcgcttacgcccccacatacgccagattcagcaacggatacggtttccccaaatcgtccacctcagagcgtcccgtaaccttaaaacccaccttcttatagaacccaaccgcctgctcattttgctcattaacgttggttgtcagttccggtgccatgctgagcgcatgctccaccagcacccgacctacgccgcagccgcgcacatcaggatcgataaacagcgcatccatatgctgcccacttagcaacataaatccaaccggctgatcccgctcattaaccgcgacccacaacggcgcttccggcaggaaggaacgaactaggtcctccagctcggtccgatactctgcacttagaaaatcgtgagtggcatcgacagaacgacaccaaatcgcaacgagttcctccccttcctcatgccgactgcggcgaatactaataaccattttctctccttttagtcattcttatattctaacgtagtcttttccttgaaactttctcaccttcaacatgcaggctcgacattggcaaattttctggttatcttcagctatctggatgtctaaacgtataagcgtatgtagtgaggtaatcaggttatgccgattcgtgtgccggacgagctacccgccgtcaatttcttgcgtgaagaaaacgtctttgtgatgacaacttctcgtgcgtctggtcaggaaattcgtccacttaaggttctgatccttaacctgatgccgaagaagattgaaactgaaaatcagtttctgcgcctgcttagtaacagtcctttgcaggtcgatattcagctgttgcgcatcgattcccgtgaaagccgcaacacgcccgcagagcatctgaacaacttctactgtaactttgaagatattcaggatcagaactttgacggtttgattgtaactggtgcgccgctgggcctggtggagtttaatgatgtcgcttactggccgcagatcaaacaggtgctggagtggagcaaagatcacgtcaccagcacgctgtttgtctgctgggcggtacaggccgcgctcaatatcctctacggcattcctaagcaaactcgcaccgaaaaactctctggcgtttacgagcatcatattctccatcctcatgcgcttctgacgcgtggctttgatgatagtttcctggcaccgcatagccgctatgctgactttccggcagcgttgattcgtgattacaccgatctggaaattctggcagagacggaagaaggggatgcatatctgtttgccagtaaagataagcgcattgcctttgtgacgggccatcccgaatatgatgcgcaaacgctggcgcaggaatttttccgcgatgtggaagccggactagacccggatgtaccgtataactatttcccgcacaatgatccgcaaaatacaccgcgagcgagctggcgtagtcacggtaatttactgtttaccaactggctcaactattacgtctaccagatcacgccatacgatctacggcacatgaatccaacgctggattaatcttctgtgatagtcgatcgttaagcgattcagcaccttacctcaggcaccttcgggtgccttttttatttccgaaacgtacctcagcaggtgaataaattttattcatattgttatcaacaagttatcaagtatttttaattaaaatggaaattgtttttgattttgcattttaaatgagtagtcttagttgtgctgaacgaaaagagcacaacgatccttcgttcacagtggggaagttttcggatccatgacgaggagctgcacgatgactgaacaggcaacaacaaccgatgaactggctttcacaaggccgtatggcgagcaggagaagcaaattcttactgccgaagcggtagaatttctgactgagctggtgacgcattttacgccacaacgcaataaacttctggcagcgcgcattcagcagcagcaagatattgataacggaacgttgcctgattttattagcgaaacagcttccattcgcgatgctgattggaaaattcgcgggattcctgcggacttagaagaccgccgcgtagagataactggcccggtagagcgcaagatggtgatcaacgcgctcaacgccaatgtgaaagtctttatggccgatttcgaagatagtctggcaccagactggaacaaagtgatcgacgggcaaattaacctgcgtgatgcggttaacggcaccatcagttacaccaatgaagcaggcaaaatttaccagctcaagcccaatccagcggttttgatttgtcgggtacgcggtctgcacttgccggaaaaacatgtcacctggcgtggtgaggcaatccccggcagcctgtttgattttgcgctctatttcttccacaactatcaggcactgttggcaaagggcagtggtccctatttctatctgccgaaaacccagtcctggcaggaagcggcctggtggagcgaagtcttcagctatgcagaagatcgctttaatctgccgcgcggcaccatcaaggcgacgttgctgattgaaacgctgcccgccgtgttccagatggatgaaatccttcacgcgctgcgtgaccatattgttggtctgaactgcggtcgttgggattacatcttcagctatatcaaaacgttgaaaaactatcccgatcgcgtcctgccagacagacaggcagtgacgatggataaaccattcctgaatgcttacagtcgcctgttgattaaaacctgccataaacgcggtgcttttgcgatgggcggcatggcggcgtttattccgagcaaagatgaagagcacaataaccaggtgctcaacaaagtaaaagcggataaaagcctggaagccaataacggtcacgatggcacatggatcgctcacccaggccttgcggacacggcaatggcggtattcaacgacattctcggctcccgtaaaaatcagcttgaagtgatgcgcgaacaagacgcgccgattactgccgatcagctgctggcaccttgtgatggtgaacgcaccgaagaaggtatgcgcgccaacattcgcgtggctgtgcagtacatcgaagcgtggatctctggcaacggctgtgtgccgatttatggcctgatggaagatgcggcgacggctgaaatttcccgtaccagcatctggcagtggatccatcatcaaaaaacgttgagcaatggcaaaccggtgaccaaagccttgttccgccagatgctgggcgaagagatgaaagtcattgccagcgaactgggcgaagaacgtttctcccaggggcgttttgacgatgccgcacgcttgatggaacagatcaccacttccgatgagttaattgatttcctgaccctgccaggctaccgcctgttagcgtaaaccaccacataactatggagcatctgcacatgaaaacccgtacacaacaaattgaagaattacagaaagagtggactcaaccgcgttgggaaggcattactcgcccatacagtgcggaagatgtggtgaaattacgcggtagtgtcaatcctgaatgcacgctggcgcaactgggcgcagcgaaaatgtggcgtctgctgcacggtgagagcaaaaaaggctacatcaacagcctcggcgcactgactggcggtcaggcgctgcaacaggcgaaagcgggtattgaagcagtctatctgagcggatggcaggtagcggcggacgctaacctggcggccagcatgtatccggatcagagcctctatccggcaaacagcgtgccagctgtggtggagcggatcaacaacaccttccgtcgtgccgatcagatccaatggtccgcgggcattgagccgggcgatccgcgctatgtcgattacttcctgccgatcgttgccgatgcggaagccggttttggcggtgtcctgaatgcctttgaactgatgaaagcgatgattgaagccggtgcagcggcagttcacttcgaagatcagctggcgagtgtgaagaaatgcggtcacatgggcggcaaagttttagtgccaactcaggaagctattcagaaactggtcgcggcgcgtctggcagctgacgtgacgggcgttccaaccctgctggttgcccgtaccgatgctgatgcggcggatctgatcacctccgattgcgacccgtatgacagcgaatttattaccggcgagcgtaccagtgaaggcttcttccgtactcatgcgggcattgagcaagcgatcagccgtggcctggcgtatgcgccatatgctgacctggtctggtgtgaaacctccacgccggatctggaactggcgcgtcgctttgcacaagctatccacgcgaaatatccgggcaaactgctggcttataactgcagcccgagcttcaactggcagaaaaacctcgacgacaaaactattgccagcttccagcagcagctgagcgatatgggctacaagttccagttcatcaccctggcaggtatccacagcatgtggttcaacatgtttgacctggcaaacgcctatgcccagggcgagggtatgaagcactacgttgagaaagtgcagcagccggaatttgccgccgcgaaagatggctataccttcgtatctcaccagcaggaagtgggtacaggttacttcgataaagtgacgactattattcagggcggcacgtctagtgtcaccgcgctgaccggctccactgaagaaagccagttctaagcaacaacaaccgttgctgactgtaggccggataaggcgttcacgccgcatccggcaatcggtgcacgatgcctgatgcgacgcttgcgcgtcttatcatgcctacagccgttgccgaacgtaggctggataaggcgtttacgccgcatccggcaattctctgctcctgatgagggcgctaaatgccgcgtggcctggaattattgattgctcaaaccattttgcaaggcttcgatgctcagtatggtcgattcctcgaagtgacctccggtgcgcagcagcgtttcgaacaggccgactggcatgctgtccagcaggcgatgaaaaaccgtatccatctttacgatcatcacgttggtctggtcgtggagcaactgcgctgcattactaacggccaaagtacggacgcggcatttttactacgtgttaaagagcattacacccggctgttgccggattacccgcgcttcgagattgcggagagcttttttaactccgtgtactgtcggttatttgaccaccgcagccttactcccgagcggctttttatctttagctctcagccagagcgccgctttcgtaccattccccgcccgctggcgaaagactttcaccccgatcacggctgggaatctctactgatgcgcgttatcagcgacctaccgctgcgcctgcgctggcagaataaaagccgtgacatccattacattattcgccatctgacggaaacgctggggacagacaacctcgcggaaagtcatttacaggtggcgaacgaactgttttaccgcaataaagccgcctggctggtaggcaaactgatcacaccttccggcacattgccatttttgctgccgatccaccagacggacgacggcgagttatttattgatacctgcctgacgacgaccgccgaagcgagcattgtttttggctttgcgcgttcttattttatggtttatgcgccgctgcccgcagcgctggtcgagtggctacgggaaattctgccaggtaaaaccaccgctgaattgtatatggctatcggctgccagaagcacgccaaaaccgaaagctaccgcgaatatctcgtttatctacagggctgtaatgagcagttcattgaagcgccgggtattcgtggaatggtgatgttggtgtttacgctgccgggctttgatcgggtattcaaagtcatcaaagacaggttcgcgccgcagaaagagatgtctgccgctcacgttcgtgcctgctatcaactggtgaaagagcacgatcgcgtgggccgaatggcggacacccaggagtttgaaaactttgtgctggagaagcggcatatttccccggcattaatggaattactgcttcaggaagcagcggaaaaaatcaccgatctcggcgaacaaattgtgattcgccatctttatattgagcggcggatggtgccgctcaatatctggctggaacaagtggaaggtcagcagttgcgcgacgccattgaagaatacggtaacgctattcgccagcttgccgctgctaacattttccctggcgacatgctgtttaaaaacttcggtgtcacccgtcacgggcgtgtggttttttatgattacgatgaaatttgctacatgacggaagtgaatttccgcgacatcccgccgccgcgctatccggaagacgaacttgccagcgaaccgtggtacagcgtcagcccgggcgatgttttcccggaagagtttcgccactggctatgcgccgacccgcgtattggtccgctgtttgaagagatgcacgccgacctgttccgcgctgattactggcgcgcactacaaaaccgcatacgtgaagggcatgtggaagatgtttatgcgtatcggcgcaggcaaagatttagcgtacggtatggggagatgcttttttgagtaaagcttccatataatttttctccgcaatgtatcgagggttatccgtaaagccaaagctttcagccatcttatttaatgtattaaggattaattcagcaataacccggtgaccaaattcaaaagccaactcaaaggcagagtatttttgtggggctttgtgttgccaaaaatccataatatcttcagcggtaaatccaaacaggcgtgcatggtcagataaagcaagataaaccgtctctacaacattttgttgtttatgctgtatcgcactaaacaaaccgggatattcattagaattatttgccaggaggaggggcttcatattttttttatcgaatttaaacgtattaaacagagtgggtaatgcgttaaaaatagtattaataacgttcatgtgtccgcgctgcatggccataaacaaacccgtgtcgcgcgcaagacttttagcggtcagaagatctacaatatcggaagcactaatgttaatttcctgggctaggctgggcaatgcttcaagaataactttcacgatatcgctatgtccattttgcatcgccagatatagtcctgggcaaccataaaaatcctttgccttcaggagatcgagtacctgttctttagtcaaatgacatgtgcgaattaacaaaggtaacgcgttcaaaacaattttcagcatgtcggcatcaccattcgccataacatggtataaaacatggctggacgttctatttttggcactcaggaatttatacacttgttcgttatctaaatgatgtgttgcggccagtttaggtaaggcgttcagaatgctggttacaacatttttatccttacgacttatcgctaaaaataatccagaaaaaccatttttatcttttgcctccagaatatgcatgagattttttttgctgagtaatccttcatatcctgtttcactcaaactattgaaaatagtctcaacgatatccgcattaccataatttatagccaaatataaacctggcaggttaatactattataggcagtcaacatttctgttctatgtagttctggcattttctggagttgaatcatcagttgcgtaagttggtgattctgaccaattgccattagcaaattcatcgttgcaggacttaatggaggggttatttcatccacagatccttttaacatcaatagctgttctttcggaagtgctggaattattgcaacagattgattaataacatgatcattactccatttcaggaggctataatctacattcataaaatccatcagagaatagtgtttaatattctctttgctttcgctcataattcttattttatcgttagttacattaggatcataaacgctaaccacgtaatgggtacatccttcagttgtgttctttattcttagccggaccgtcaaagcatggttatccaccagtaatatggctgccataacactgatgccattactttccatcttgtcaaaatatgctttcataactagcccgaaatcaccgcaggcagcaacgcaacgcccctcaggacggctggaaaccaacgccaaagtctggtttttgcattttttgttgaagtgcgtgagaaatttttcagcactagagtaatcatcttgatggggtttgtaatcaacattctgataaatatcattaatatattgtgcagcaatgtgtcggcatactatacggttttggggtcgccccggaaaataacattgaccattaagtttaattcttgggaattctttttcttttctatcactttttaggtttaattcttgtttatcaagagtgtcactgcgttgaggtaaaatttccattaggtatttttcaaatattggggcaatggtttgagtaagtgtcgtgttttcgtttttattaattatcgtaatttctttcttatcagcttgtaagacggacgtggaaaatttaatgacaaaatccttgttgctaaagatatgacgaccattttgtctacagttctcactgaagctttttaatagaggcgtcgccagctccttgccagaaaatttatcctcgagttctttataaaacaattcactcagggtttggtgttcatttgtctgggctgtattattaatatttgcagagaaagaactacgaggaatacgagtaatcatttaaatatctcattgtttattgatgtcttgaattttaactatcagaacagtgaaaaaatttaatatgattacaactaaagaaatatcataaatcgctcaatctcataatgcagccgtaaaagtttcggtggaatgagatcttgcgattttgttaataattaagtggtttgatgtttaaaaataatgctgagttaataaaagtgtgtgaagtgtatgacattaagttattttggcgtcaatgcgattaacagacacccttattctattgccactcaggtatgatgggcagaatattgcctctgcccgccagaaaaagtcagcgcattccaccgtacgccagcgtcacttccttcgccgctttaatcaccatcgcgccaaactcggtcacgcggtcatcggtaatacgactaatcggtccggaaatagaaattgcggcaaacggttcacggtgctcatcgaaaatacacgctgcaaggcaacgtagccccagtgcatgttcctcatcgtcaaaactataaccccgtttgcgcgtttgggcgagatcttcttttaaatgcacaggagacaccagcgttgcgtgggtataggcatgtaaccctttgcggtgcagcagcttcgtcacctgttcttcgctcagttgggctaaaaaggctttacccgcaccggaagcgtgcatcggcaatttaccgccgataggcgcggacattcgcatcagatgcgtacactgtacctggtcgataataatcgcttcgtgatcgctttgatcaagcaccgccatattgaccgtttcgccagactcttccattagattgcgcaggatagggtgaacaatcgctaacaaattacggctctggagaaagctgctgccgaccataaaggcatgtgcgccgattgcccaatgtcccagttcgccaacctgacgcacgaaaccctgctgttgcatcgtggttagcaggcggtgggtcgtggaattgggtaacccggcttgttgcgccagttccgtgagtgccacactgccattggattcggcaatccactccagtaatttcaggccacgcgttaaagactgaacctgtccagtcgctggtgcggtggcaacggcgggttttctgccgcgtttcgcgggaatgggtgcgaccatgacagtctcttttttctgtatcgtggaaatcattttcatttttattgttagctaatgcaatagttactgaactgatccgatgagttaatgttgaacaaatctcatgttgcgtggtggtcgcttttaccacagatgcgtttatgccagtatggtttgttgaatttttattaaatctgggttgagcgtgtcgggagcaagtgtgagcagcaaagtggaacaactgcgtgcgcagttaaatgaacgtattctggtgctggacggcggtatgggcaccatgatccagagttatcgactgaacgaagccgattttcgtggtgaacgctttgccgactggccatgcgacctcaaaggcaacaacgacctgctggtactcagtaaaccggaagtgatcgccgctatccacaacgcctactttgaagcgggcgcggatatcatcgaaaccaacaccttcaactccacgaccattgcgatggcggattaccagatggaatccctgagcgcggaaatcaactttgcggcggcgaaactggcgcgagcttgtgctgacgagtggaccgcgcgcacgccagagaaaccgcgctacgttgccggtgttctcggcccgaccaaccgcacggcgtctatttctccggacgtcaacgatccggcatttcgtaatatcacttttgacgggctggtggcggcttatcgagagtccaccaaagcgctggtggaaggtggcgcggatctgatcctgattgaaaccgttttcgacacccttaacgccaaagcggcggtatttgcggtgaaaacggagtttgaagcgctgggcgttgagctgccgattatgatctccggcaccatcaccgacgcctccgggcgcacgctctccgggcagaccaccgaagcattttacaacagtttgcgccacgccgaagctctgacctttggcctgaactgtgcgctggggcccgatgaactgcgccagtacgtgcaggagctgagtcggattgcggaatgctacgtcaccgcgcacccgaacgccgggctacccaacgcctttggtgagtacgatctcgacgccgacacgatggcaaaacagatacgtgaatgggcgcaagcgggttttctcaatatcgtcggcggctgctgtggcaccacgccacaacatattgcagcgatgagtcgtgcagtagaaggattagcgccgcgcaaactgccggaaattcccgtagcctgccgtttgtccggcctggagccgctgaacattggcgaagatagcctgtttgtgaacgtgggtgaacgcaccaacgtcaccggttccgctaagttcaagcgcctgatcaaagaagagaaatacagcgaggcgctggatgtcgcgcgtcaacaggtggaaaacggcgcgcagattatcgatatcaacatggatgaagggatgctcgatgccgaagcggcgatggtgcgttttctcaatctgattgccggtgaaccggatatcgctcgcgtgccgattatgatcgactccagtaaatgggacgtcattgaaaaaggtctgaagtgtatccagggcaaaggcattgttaactctatcagcatgaaagagggcgtcgatgcctttatccatcacgcgaaattgttgcgtcgctacggtgcggcagtggtggtaatggcctttgacgaacagggacaggccgatactcgcgcacggaaaatcgagatttgccgtcgggcgtacaaaatcctcaccgaagaggttggcttcccgccagaagatatcatcttcgacccaaacatcttcgcggtcgcaactggcattgaagagcacaacaactacgcgcaggactttatcggcgcgtgtgaagacatcaaacgcgaactgccgcacgcgctgatttccggcggcgtatctaacgtttctttcagcttccgtggcaacgatccggtgcgcgaagccattcacgcagtgttcctctactacgctattcgcaatggcatggatatggggatcgtcaacgccgggcaactggcgatttacgacgacctacccgctgaactgcgcgacgcggtggaagatgtgattcttaatcgtcgcgacgatggcaccgagcgtttactggagcttgccgagaaatatcgcggcagcaaaaccgacgacaccgccaacgcccagcaggcggagtggcgcagctgggaagtgaataaacgtctggaatacagcctggtcaaaggcattaccgagtttatcgagcaggataccgaagaagcccgccagcaggctacgcgcccgattgaagtgattgaaggcccgttgatggacggcatgaatgtggtcggcgacctgtttggcgaagggaaaatgttcctgccacaggtggtcaaaagcgcgcgcgtcatgaaacaggcggtggcctacctcgaaccgtttattgaagccagcaaagagcagggcaaaaccaacggcaagatggtgatcgccaccgtgaagggcgacgtccacgacatcggtaaaaatatcgttggtgtggtgctgcaatgtaacaactacgaaattgtcgatctcggcgttatggtgcctgcggaaaaaattctccgtaccgctaaagaagtgaatgctgatctgattggccttagcgggcttatcacgccgagcctggacgagatggttaacgtggcgaaagagatggagcgtcagggcttcactattccgttactgattggcggcgcgacgaccagtaaagcgcacacggcggtgaaaatcgagcagaactacagcggcccgacggtgtatgtgcagaatgccagccgtaccgttggtgtggtggcggcgctgctttccgatacccagcgtgatgattttgtcgctcgtacccgcaaggagtacgaaaccgtacgtattcagcacgggcgcaagaaaccgcgcacaccaccggtcacgctggaagcggcgcgcgataacgatttcgcttttgactggcaggcttacacgccgccggtggcgcaccgtctcggcgtgcaggaagtcgaagccagcatcgaaacgctgcgtaattacatcgactggacaccgttctttatgacctggagcctggccgggaagtatccgcgcattctggaagatgaagtggtgggcgttgaggcgcagcggctgtttaaagacgccaacgacatgctggataaattaagcgccgagaaaacgctgaatccgcgtggcgtggtgggcctgttcccggcaaaccgtgtgggcgatgacattgaaatctaccgtgacgaaacgcgtacccatgtgatcaacgtcagccaccatctgcgtcaacagaccgaaaaaacaggcttcgctaactactgtctcgctgacttcgttgcgccgaagctttctggtaaagcagattacatcggcgcatttgccgtgactggcgggctggaagaggacgcactggctgatgcctttgaagcgcagcacgatgattacaacaaaatcatggtgaaagcgcttgccgaccgtttagccgaagcctttgcggagtatctccatgagcgtgtgcgtaaagtctactggggctatgcgccgaacgagaacctcagcaacgaagagctgatccgcgaaaactaccagggcatccgtccggcaccgggctatccggcctgcccggaacatacggaaaaagccaccatctgggagctgctggaagtggaaaaacacactggcatgaaactcacagaatctttcgccatgtggcccggtgcaagcgttagcggttggtacttcagccacccggacagcaagtactacgctgtagcacaaattcagcgcgatcaggttgaagattatgcccgccgtaaaggtatgagcgttaccgaagttgagcgctggctggcaccgaatctggggtatgacgcggactgattcacaaatctgtcacttttccttacaacaaacagggcgctcaatgagtgccctgtctctttattaatatgaaacacttatactggaaacaggctggaataatcttagccggaaaaacgaatgtcaaaaggcacagtaaagatgccagtcagcgtgtttccggtcctttggtcattcaattgcttcaggaacatataacgataaggagaacctgaactcgtgttaacgctgcttcacctgctttctgccgtcgccctgctggtctgggggactcatattgttcgaaccggcgtaatgcgcgtcttcggcgcgcgtttgcgtactgtccttagccggagcgtcgaaaaaaagccgctcgccttttgcgcggggatcggcgttaccgcactggtacagagcagtaatgccaccaccatgctggtgaccagctttgtcgctcaggatctggtagccctcgcaccggctctggtcattgtgctgggtgcagatgtcgggacggcgctaatggcgcgtattctcaccttcgacttatcctggctgagtccgttacttatttttatcggcgtgatttttttcctcggacgcaaacagagtcgcgccgggcaactgggccgcgtcggtattggtcttgggctgattttgctagcgctggagttgattgtgcaggccgtaacgccgatcacccaggcaaacggcgttcaggtgatctttgccagcctgaccggcgatattctgctggatgcgctgattggcgcgatgttcgccattatcagctactccagccttgctgctgtactgctgaccgcgactctgaccgccgcaggcattatctccttccccgtggcgctctgtctggtgattggtgctaacctcggttccggtctgctggcaatgctcaacaacagtgccgccaatgccgcagcccgccgtgtcgcgctgggtagtctgctgtttaagctggtgggtagcctgattatcctgccgtttgtccatttgctggcagagacaatggggaagttgagtttgccaaaagcggaactggtgatctatttccacgtcttctacaaccttgtacgttgcctggtcatgctgccatttgttgacccgatggcacggttttgcaaaacgattattcgcgatgaaccggaactggatacccagctacggcctaaacatctggatgtcagcgcgctggatacgcccacgcttgctctggcgaacgccgcgcgcgaaaccctgcgcattggcgacgccatggaacagatgatggaagggttgaataaagtgatgcacggtgagccacggcaggagaaagagctgcgtaagctggcagatgatatcaacgttctctacaccgccattaagctgtatctggcgcggatgccaaaagaagagctggcggaggaagagagccgccgctgggcagagatcatcgaaatgagcctcaaccttgaacaggcctccgatatcgtcgagcgcatgggcagcgaaattgctgacaaaagtctggcagcacggcgggcatttagccttgatgggttgaaggaactggatgcgctctatgagcaattgctcagtaatttaaagctggcaatgagcgtgttcttctctggcgatgtcaccagcgctcgtcgtttgcgtcgcagcaaacatcgttttcgcattcttaatcgccgctattcccacgcccacgtcgatcgcctgcatcagcaaaacgtgcagagcattgaaaccagtagcctacatttaggcttactgggagatatgcagcgcctgaacagcctgttttgtagcgtggcttacagtgtgctggaacagccggatgaagatgaaggacgggacgagtattaatattgtgaatcctgtaggcctgataagacgcgtcaagcgtcgcatcaggcactatgaacaagatgccggatcatgcatccggcaattcacttaaaaacggtgaccagcttccagcggaaccgcttcttcaccagccttaaacacataagtggtgttcgggccacccagcgtagcgtgacctttactcactgtgatccagttaccttccggtagaccaataatcgtcagttctggcgcgacgaccagcagttcgcgaatacgctgctcacgggtttcacctttatggccttccggcagcgcgttggtgaagtgcgggttgatttgcagcgggaacagatttagcgcatcgaaaccttgcggatcgacaatcggcatatcgttggtggtacgaatagttgggcaagcaaggttagcgcctgcgctccagccaatatacagagcgccacgtttaaccacgtcagtaattggtgccagcagcccgcgctcgcggcactgtttcagcaactggaaagtattcccgccgccgacaatcacgatctcagcattttcaatcgcggcaacgggatcgacaacgctatgaataccggtgacagaaacacccagcggagcgagaaccgcagccgttttcgctgtgtaatcatcccaggtctgcgttacgccagcgaaagggataaacaccgcactgcggcgaccctgcaactgttcagcaattagcggcagtgcatgttccagccaggctttacccggcagcgtgctgttactcaataaaagcagttccattacttctccggttagtaagaaatcacgggaggcatgctaccactgcgaatttaaccacttactgacatggctcacgatgtcgcacattgcttctggaaagtgatttgagcaggtaacgaattcaagccaatggaaataacaaatagttcgctcatgactattttttatcaacccaaaggtacggtatattccgttttttacaggagaatttatgctgcccgacagtagtgtccgtttaaataaatacatcagcgaaagcggaatttgcagtcgccgcgaagcggatcgctatatcgagcaaggcaatgtgttccttaatggcaagcgagccaccattggcgatcaggtgaaacccggcgacgttgtgaaagtaaacggtcagttgattgaacctcgggaagccgaagatttggtacttatcgccctgaacaagcccgttggtattgtaagcaccaccgaagatggcgagcgcgataacattgtcgatttcgttaaccacagcaaacgcgtgttcccgattggccgcctggataaagactcccaggggctgattttcctcaccaatcacggcgatctggtgaataagatcctgcgtgctggcaatgatcatgagaaagagtatctggtgacggtcgataaaccgattaccgaggagtttattcgcggcatgagtgcgggggtgccaatcctcgggacagtgaccaaaaagtgcaaagttaaaaaagaagcgccgtttgtcttccgcattaccctggtgcaggggctgaaccgtcagatccggcgcatgtgcgagcatttcggctatgaagtgaaaaagctggaacgcacgcgcatcatgaacgttagcttaagcggcattccgctgggggaatggcgcgatttaaccgacgatgagttaatcgacctctttaagctcattgaaaattcctcttccgaggtaaaacctaaagcgaaggccaaaccgaaaacagcgggcatcaaacgtccagtcgttaagatggaaaaaacggcggaaaaaggcggtcgcccggcgtccaacggtaagcgttttaccagcccggggcgtaaaaagaaggggcgctgattaacgcctcagactgatgaaaacggcccaaaagtgcccggacagtcccctcgccccttcgggaaaagggttagggtgaggggaaaattgtgttcacactgacgagtgaaaatctcaggcgttgattgtggattagcgcctgccgcgcgtgctcgtatttgcactccagctaaaactcgcttcaggatccggtttataagcctgctttttcttcaactggcgggcttttttcgcttcagcctcacgctcaaccattaatttatcgatgtaatctttcttaatgctgttggtttcggagttggtcaatacgcgaccatgcgcaatccgcgcccgatccagcagtgttttaagttcacgctgctcgcgttcagtcatctctttttgggtaatacgggggagtgccatgatggtgccctcagtgagccagagagttcagtgtacgggaattcgtttgcgagcagaactgataatattcattttgccttctcttaactatttatctctttcgataattaattagagatgcagataaaaaaattaaaggcaattattctccgataaagacgctggttaacagagtacaggctcgtttattgatgagcatagtgacaagaaaatcaatacggcccgaaatatagcttccaggccatacagtatttactcaaacaaattactatgcagtttttgcaccacctgctcggcatcttcgccgggcaccaggaagcacaggttatggctggatgcgccataacaaatcatgcgaatgttgaacggttccagtacgccgaatacctctttgccaacgccgcaggctttactcaggtcattgccaatcaacgcgaccagcgccagaccttcttccacctccacccgacacagtgcggaaagctccatcagcagagattgcgtcagcaacgtatcgccagtggaggtactaccggtggtatcaagggttaatgccacgctcacttcactcgtggtgattaagtctacgctaatattatgccgcgcgaggatgccgaaaacttccgcgaggaaaccgcgagaatgcagcatattcaggctgtgcaaagtgagcagagtctgattgcgacgaagcgccagagcgcggaacagcggcggattttcagttttattgcacaccagcgtaccacctgcgcgtgggtctttgctggagccgacaaagaccgggatatcgctgcgtactgcgggtagcaacgttgccggatgcagtacttttgcaccaaaagttgccatctctgccgcttcggcaaacgcgatttcatcaatgcgttttgctgcggaaactacgcgtggatcggtggtgtagatgcccgggacgtcggtccagatatcaacacgagatgcgtgtaaagcctccgccagcaaggctgccgtataatcgctgcctccacggccaagcgtcgttgtacgacctttattttcgctaccgataaatccctgggtgatcactaagccttcattgagacgtgggagcagctgcagcgcggccagttccgccagcgcggctatatctggctctgcacgaccaaatcggtcgttggtacgcatcactttacgtacatcaaaccactgtgcctgaacatcgcgttcgcgcaggatctcaacaaacagcagggtgctcatcagctcgccgtggctgaccagctcatctgtcagcgccggagacgttgccagcgccgccgcttctgccagaacagtaatgttctccagcagacgttcaatctcttcacggataacgttcgggtaacgcagacgttccagaatggcaaactggatgttgcggatagcgtcgagtttttcgaatcgctcgccaggttccagtccttcagctaaagcgaccagcagattagtgataccagcagaagcgctgaggacaactaaacgcacgttggcatcagaaagcacaatatcagcgctgcggttcatggcgtcaaaatcagctacgctggtaccgccaaatttggagacaacaatttcagacataactacctcgtgtcaggggatccattttcagccttggcacaagggaagagcggaagacgggtgggcgcagagcgatacttcgctactattttcacccagaagtgctccaccacttgcgaaacgcccgactgcgaacgcttctggtgacaacccaggggattcagcccctgtagccgatgatgaacgtggccagccgttcaatcacctcggcgatgcaccccctcaggtgttatcacaggactggctcctccaacaccgttacttgggcaacgcgcctcttctggcctgcgctagcgcaggtagtacatttataaataaagggtgagcggggcggttgtcaacgatggggtcatgcggatttttcatccactcctggcggtcagtagttcagctaataaatgcttcactgcgctaagggtttacactcaacattacgctaacggcactaaaaccatcacatttttctgtgactggcgctacaatcttccaaagtcacaattctcaaaatcagaagagtattgctaatgaaaaacatcaatccaacgcagaccgctgcctggcaggcactacagaaacacttcgatgaaatgaaagacgttacgatcgccgatctttttgctaaagacggcgatcgtttttctaagttctccgcaaccttcgacgatcagatgctggtggattactccaaaaaccgcatcactgaagagacgctggcgaaattacaggatctggcgaaagagtgcgatctggcgggcgcgattaagagcatgttctctggcgagaagatcaaccgcactgaaaaccgcgccgtgctgcacgtagcgctgcgtaaccgtagcaataccccgattttggttgatggcaaagacgtaatgccggaagtcaacgcggtgctggagaagatgaaaaccttcagtgaagcgattatttccggtgagtggaaaggttataccggcaaagcaatcactgacgtagtgaacatcgggatcggcggttctgacctcggcccatacatggtgaccgaagctctgcgtccgtacaaaaaccacctgaacatgcactttgtttctaacgtcgatgggactcacatcgcggaagtgctgaaaaaagtaaacccggaaaccacgctgttcttggtagcatctaaaaccttcaccactcaggaaactatgaccaacgcccatagcgcgcgtgactggttcctgaaagcggcaggtgatgaaaaacacgttgcaaaacactttgcggcgctttccaccaatgccaaagccgttggcgagtttggtattgatactgccaacatgttcgagttctgggactgggttggcggccgttactctttgtggagtgcgattggcctgagcattgttctctccatcggctttgataacttcgttgaactgctttccggcgcacacgcgatggacaagcatttctccaccacgcctgccgagaaaaacctgcctgtactgctggcgctgattggcatctggtacaacaatttctttggtgcggaaactgaagcgattctgccgtatgaccagtatatgcaccgtttcgcggcgtacttccagcagggcaatatggagtccaacggtaagtatgttgaccgtaacggtaacgttgtggattaccagactggcccgattatctggggtgaaccaggcactaacggtcagcacgcgttctaccagctgatccaccagggaaccaaaatggtaccgtgcgatttcatcgctccggctatcacccataacccgctctctgatcatcaccagaaactgctgtctaacttcttcgcccagaccgaagcgctggcgtttggtaaatcccgcgaagtggttgagcaggaatatcgtgatcagggtaaagatccggcaacgcttgactacgtggtgccgttcaaagtattcgaaggtaaccgcccgaccaactccatcctgctgcgtgaaatcactccgttcagcctgggtgcgttgattgcgctgtatgagcacaaaatctttactcagggcgtgatcctgaacatcttcaccttcgaccagtggggcgtggaactgggtaaacagctggcgaaccgtattctgccagagctgaaagatgataaagaaatcagcagccacgatagcagcaccaatggtctgattaaccgctataaagcgtggcgcggttaatcatcgtcgatatgtaggccggataaggcgttcacgccgcatccggcaaccgatgcctgatgcgacgcggtcgcgtcttatcaggcctacaggtcgatgccgatatgtacatcgtattcggcaattaatacatagcacgattgattaaataaccttaataacaatgccgacgttatgtcggcatttttttatcagataaatccccttgtctgtaatttaacggaaatcataccgtgaggttaatcctaaaatagatttttaatcgttgtttatttcggaaaatacgcagattaattgcttttgtttttattttaagtttatgatttttattgttatttaaatataagttgaaacttatatttgatattcattccaattatcctaaaacgccatcgctaattccccgcgccgtaattcgcatgctttagttgtgtatactcgatcccgcccgaaatgtttttgggtaaatctccattcattcaatgaagggaaattgttatgaaaaaagttctgtatggcatttttgccatatctgcgcttgcggcgacttctgcgtgggctgcacctgtacaggtgggcgaagcggcagggagcgcagcaacgagcgttagcgcggggagttcctccgcgaccagcgtcagcaccgtaagcagcgcggtgggtgtcgcgcttgcggcaaccggtggcggtgatggttctaataccgggaccaccacaaccacgaccaccagtacccagtaataaagtatgtatccccaaaataattcgagtcattgcatctgtggctagaagtatgaagggattaaccataaccacactccggtgtggttattctgcccctctggagaagagtcgtgaagcgacctgcactcattcttatctgcctgttattacaggcctgtagtgccacgactaaagagctgggcaatagtctgtgggacagtctgttcggcacgccaggcgtacagctgacggatgatgatattcaaaatatgccctacgccagccagtacatgcagcttaatggcgggccgcagttatttgtggtgctggccttcgctgaagacggacaacaaaaatgggtcactcaggatcaggctactctcgttacccaacatggccgtctggtgaagactctgctcggcggcgacaacctgattgaagtgaataaccttgctgccgacccgctgattaaacccgcacaaatcgttgatggcgcaagctggacgcgcacgatgggctggaccgagtaccagcaggtacgctacgccaccgcacgcagtgtcttcaaatgggatggcaccgataccgtcaaagtcggcagcgatgaaaccccggttcgcgtgctggacgaagaagtctccaccgaccaggcgcgctggcataaccgctattggatcgacagcgaagggcaaattcgccagagcgaacagtatctcggcgcggattattttccggtgaaaaccactctcatcaaggcggcaaaacaatgattaaacaaactattgtcgcgttgcttttgagtgtgggagcgagtagcgtcttcgcggcaggaaccgtcaaggtgttcagcaatggcagcagtgaggccaaaacgctaacgggcgcagagcatttaatcgatctggtaggccaaccgcggctggcaaacagctggtggcccggtgcggtgattagcgaagagctggcaacggcggcagcattgcgtcagcagcaggcgttgctgacacggctggcagaacagggcgcagattccagcgccgacgatgccgctgcgattaacgccttacgccagcaaattcaggcgttgaaagtgacgggcaggcaaaaaatcaatcttgatcccgatatcgtccgcgttgccgaacgcggtaacccgccgttgcagggcaactacacgctgtgggtcggaccaccgccgtccacggtcacgttgttcgggcttatcagccgtcctggcaagcagccattcactccaggtcgcgacgtggcgagctatctctctgaccagagcctgctcagcggtgcggatcgcagctacgcgtgggtggtttacccggacggacgcacgcaaaaagcgccggtggcttactggaacaagcgtcacgtagagccgatgcccggcagcattatttatgttggcctcgcggactccgtctggagtgagacgcctgatgcccttaacgccgacattcttcagactctgacgcagcggatacctcaataatgaaaaaaagacatctgcttagcttactggcgctgggcattagcacagcttgctacggcgaaacatatcctgcgcccattggtccgagccagagcgatttcggtggcgtaggattattacaaacgcccaccgcgcgtatggcacgggaaggggagttgagtctgaactatcgcgataacgatcagtaccgttattacagtgctagtgtgcaactcttcccgtggctggaaacaacgctgcgctacaccgacgtgcgcacccggcagtacagcagcgtcgaagcgttctctggcgatcaaacgtataaagataaagccttcgatctcaaactgcgtttgtgggaagagagttactggctgccgcaagtggcggttggtgcgcgggatatcggcggtacggggctgtttgatgcggaatatcttgttgccagcaaagcctgggggccgttcgattttacgctcggcctgggctgggggtatttgggcaccagcggtaatgtgaaaaatccgctctgtagtgccagtgataaatattgctatcgcgataacagctacaaacaggcgggatctatcgacggtagccagatgttccacggtcctgccagtctgtttggcggcgtggaataccagacgccctggcaaccgctgcgcctgaaactggagtatgaaggcaataattatcagcaggattttgccgggaagctggagcaaaaaagtaagtttaacgtcggtgcgatttatcgcgttaccgattgggccgacgttaaccttagctatgaacgtggcaacacctttatgtttggcgttacgttgcgcaccaactttaacgatctgcgcccgtcttacaacgataacgcccgcccgcaatatcaaccgcagccgcaggatgccattttgcagcatagcgtggtggcgaatcagttaacgctgttgaaatacaatgccggacttgccgatccacagatccaggcgaaaggcgatacgctgtatgttaccggcgagcaggtgaaatatcgtgatagccgcgaagggatcatccgtgcgaatcggatcgtgatgaacgatctgccggatgggatcaaaacgatccgcattacggaaaatcgccttaacatgccgcaggtgacgacggaaaccgatgtcgccagcctgaaaaatcatctcgccggagagccgttgggccacgaaacgacgctggcgcaaaaacgcgtcgagccagtggttccgcagtccaccgagcagggctggtatatcgacaaaagtcgctttgatttccatatcgatccggtgctgaaccagagcgtcggtggcccggaaaacttttacatgtatcagctgggcgtgatgggaacggcagatttgtggctgacggaccatctgctgaccaccggcagcctgtttgcaaatcttgccaacaactacgacaagtttaactacactaatcctccgcaggacagccacttaccgcgcgtgcgtacccatgtgcgcgagtatgtgcagaacgatgtctatgtgaataacctgcaagccaactacttccagcatctgggcaacggcttctacggtcaggtctacggtggttatctcgaaaccatgtttggcggtgcgggggcagaagtgttgtatcgcccgctggacagcaactgggcgtttggtctggatgccaactacgttaaacagcgcgactggcgtagtgcaaaagatatgatgaaattcaccgactacagcgtgaaaaccggacatctgaccgcctactggacgccatctttcgctcaggatgtgttagttaaagccagcgtcgggcagtatctggcaggggataaaggcggcacgctggagatcgccaaacgctttgatagcggcgtggtggtgggtggctatgccacgatcactaatgttagcaaagaggagtacggcgaaggggacttcaccaaaggcgtgtatgtcagcgtaccgttggatctcttcagctctggcccgacacgcagccgtgcggcgattggctggacgccgctgacgcgtgacggtggtcagcaacttgggcgtaagttccagttgtatgacatgaccagcgaccgtagcgtcaatttccgctaagtcatgggaaaggtgccagttttcgcactcactggcaccttcattcttaatggcctgtcgagccatcaggaacgcagttcactcccggtttgcgatctggtgtgtaaaggcgaaaacattctgtcttcctgtccgtcgatatcggttgcaggtctggttgcctgagcgactgggccatcattgggctggagacattgctttgcggtaggtcggctttatcagcagtaccgagcggaccagcataagcaggaagaacagagactgataacatcaaagcagcaaaataaggcttcatttttaccacctttatcaggttacgtttcatttgttccagaggaacattgtcgatttttcgcgcattgctggtggctgggaatcacctgaatgggtgatttttgaattaccggctttggtgcggtttgtcttgccggatgcgccgccaggcgcggcttatccggcctacgggtaggtatatccggctttggtggaggcgcgctccaaatccaggttgaacaaaacatacacaaaaaatatagatctccgtcacatttttgcgttatacaggaagctcgccactgtgaaggaggtactgctatgacgagtctctctcgtccgcgcgtggagtttatctccaccattttgcagaccgtactcaatcttggcctgctgtgcctcggcctgattttggttgtcttcctcggcaaagaaacggtgcatctggctgatgtgctgttcgcgccagaacaaaccagcaaatatgagctggtagaaggactggtggtttactttctctatttcgaatttatcgcgctgattgtgaagtactttcagtccggttttcacttcccgctacgttactttgtctatattgggatcaccgccattgtgcgcttgatcatcgtcgatcataaaagcccactggatgtgttgatctacagcgctgcgatcctgttactggtgatcaccctgtggctgtgtaatagcaaacggctgaagcgggagtaaaaagtcagcacgccgaaatggcgcggcgtgctggacaggaagattacagcgtagcagtttgttgtgttttcttcgtttccggttcccagagcgcttccagctcctcaagggttttacctttggtttccgggacaaatttccacataaacagtgctgccagaacgcccatacaaccgtaaatccagtaggagaaaccgttgtggaaatgggccaccagccaggagtttttgtccatcatcgggaaggtccaggagacgaagtagttcgccagccactgggccgccaccgcgattgccagcgctttaccacgaatagcattcgggaagatttcgctcagcagtacccagcataccggaccccaggacatggcaaaggcggcaacatagaacagcatgctcagtagcgccacaatacccggtgcctgagtgtaaaacgcggtaccgaggctaaacataccgattgccattccgagtgcgccgataatttgcagtggcttacgaccaaatttatccaccgtcataattgccagaacggtgaaggtgaggttgataactccgacaataatggtctgcaacagcgcgatatccgtgctggcccccagcgttttgaacacttccggcgcgtagtacagcaccacattgatgccgacaaattgctggaagatggagagcattacgccgattacaatcacgcccacgccaaacatcagcagacgaccaccggttttgcggccatgatccagggagtgtttaatttcctgtactgcctgagttgcaagcgtgttgcccataattttgcgcaggataccttccgcctgttcttgcttgccgcggctcatcagccagcgaggactttctggcacggtatacagcagcattaagaacagcagtgcagggatacattcgctggcaaacatataacgccagccgtcagtattcagccagctggcatcaccggaacgggcaataaaatagtttacgcagtaaactaaaagttgcccgaaaataatcgcaaactggttaaaagagaccagtttcccgcgaatatgagctggagccagttccgcaatatacattgggctgagcatactggctaaaccaacgccaataccgccaataatgcgataaataacaaattccgggacataacctgccagataaacaggcacagtgttgtccgggtttatagaggtaaaaccaagttctggccaggcagaacctacaccagaaataaaaaacaggacagcagcaatcttaagactatcacgacgaccgaagcggttactgcaataaccaccgagggcaccgccgatgatgcaaccaatcagagcgctggccacgcaaaaccctaacagggagttggcagcggattcacttaagttttgtggagcaacaaagacggtattgagactctcaacagtaccggaaataacggcggtgtcgtagccaaataataaaccacctaatgtagcgactaaggtaatgctaaatatataactggaattatactgggtattcattcagacctgccttagaccattctgatcttttatcagtgcattgatgttggaattgtcaggcagttaaggcaattatcattttttacaatgcgtttacgtaatgtcttttctgtgatcttaattgtgataattatccaaaattgataaaaacaatactattgccgtgactcagagcacgaaagagaattatcgtaagtgggaaaacaaataacgtaaaaataataagctctatgatggaaatattaaccggcgaacgattcagattgcagacgaaagaaaaaaaggcgctccgtggagcgccgaataacagtcacaagttgggataacgtaagttgagggtgcagcggcataacattggcagaacaacatctttaacctttcacaccacctgccgtcaggccgttgaccagccagcgttgagccagcaagaagacgatggtgatcggtaatgcagacatcacggcagcggcggcaaagtcaccccacaggtagttttgcgggttgaggtattgctgcatccccacggccagggtgtagctgtttacgtcacgcagtaacaggctcgcgaccggaacttcagtaatggcagcgataaagctcaggatgaataccaccgccagaatcggtacactcagcggcaacaggacaaggcggaaggcctgccacggtgtcgcaccatccagcgcagcagcttcttccaggctactgtcgatggtttcgaaatagcctttgatggtccagacatgcagcgcaatcccacccagatacgcgaaaattacgccgccgtgagtattcaggccaatgaatggaatgtactcacccagacgatcaaacaacgcatacaacgcgaccagactaagtactgccgggaacatctggaaaatcagcattcctttcagcagcgtcgctttgcctggaaagcgcatacgggcgaaagcgtaggcgcaggtggtggagagcgccacaatgccaatcgcggaaatcccggcgacctttacgctgttccacagccacagcagtaccgggaatggcggtggcgtaatgcgaccatcagcctgttcaacgctaaaacctaacgccagtttccagtgatcccaggagatttgctccgggatcaggctgccggtcgcaaagtttccctgacgcaggctgatagcgacgaccatcagcagcgggaacataatcgctgcgataaaaagtagcagtagcaggtgagtaataaataaacgagctttttggcttttcggttggaccattgccatttttgttatctcccttaatcaaacttcattcgcgtggctttcaggttcactatcgccagcgcacccaccagcaggaagatcagcgtggcaattgctgccgccagaccgaagtcctgacccccgccgccttcaaaagcgatgcggtaggtgtagttaacaagcaggtcggtataaccggctggcgtggtcgtgccaagacgatccgggccgccgttggttaacagttgaatcagcacgaagttgttaaagttaaaggcgaagctggcgatcatcagcggcgtcagcggtttaatcagcagcggcagcgtaatcttaaagaagttctggaacggacctgcgccatccattgcactggcttcatacaaatcgtccggaatcgctttcagcaagcccatgcagaggatcatcatgtacggataacccagccaggtattgacgataattagcatcgtgcgggcggtggtcggatcgctgaaccaggcgggcttcacgccaaacagcgcgctcaacatcatgttgatttcaccgaagctctggttaaacaaccctttgaaaatcaagatactaatgaagcttggcaccgcgtagggcagaatcagcaggacgcgatagaccgctttgccgcgcaacgcttcccactgcaccagacacgccagaaccatgccgaccgccaccgttaaaaagacagtgatcaggctgaacaccacggtccagacgaaaatggcgaggaacggtttctgaatgccttcgtcggtaaagacgcgggtaaagtttttccagccggtggtcacggtgtaaccggggcttagcttttcatcaccccagttgccgtcggcggtaatggactggtaaaagccaatttggttattcggacgatatttcacgccgctctgattattcgtcaacgtgccgtcaccgtcgagtgtgtagagcggctgcgtgccagaaaactggcgcagggagctcatcatcactttgttgccatccggcagaatggcggtaatgtcactcagcgcctgacgattctgggtaatcacgcgcagattcgcgcgttcgccttcgggctgggcggtcgtttctttcagttgcagtttttgctcgccgccaaatttaaaagcgtcggagaggtaatttttgccggtttcgccgtcgctgagcgccagttgccactcatcgcccgccgggtaaagaccaaagttataggttttgcctgcttgccaggagcgatctaacaacacttcctgcgcacgttcaaaagtcagctggttagtgctgctgtagttggtgaaggcaatggcgatggtgcagaccagagggaagaggacgaataatcccattccagccattcccgggtaaacatagcgccaggcgtaggctttacgattggcgaaaatatacagccccgcactactcaatatcagcgtggtaatggcgaacaggtattccccttgtgcgtacattaaaacaacaaggtaacccaccagcaggccgagcagacctagcacactccatttcagcgcgtcgctttgccaccaatgtttctttttaatgacatccatggggttcttcctcattccaggacggataaggctttcacgccttatccgacaacaactgcctgatgcgacgctgacgcgtcttatcaggcctacatacgtttcggttttgtaggccggacaaggcgttcacgccgcatccggcatttcacagcattacttggtgatacgagtctgcgcgtctttcagggcttcatcgacagtctgacgaccgctggcggcgttgatcaccgcagtacgcacggcataccagaaagcggacatctgcgggatgttcggcatgatttcacctttctgggcgttttccatggtggcggcaatacgtggatctttcgccaactcttcctcgtaagacttcagcgctacggcacccagcggtttgtctttattaaccgcttccagaccttcatcagtcagcagatagttttcgaggaactctttcgccagctctttgttcggactggcggcgttaatacctgcgctcagcacgccaacgaacggtttggatggttgacccttgaaggtcggcagtaccgttacaccataattcactttgctggtgtcgatgttggaccatgcccacgggccgttgatggtcatcgctgtttcgcctttattaaaggcagcttctgcgatggagtaatcggtgtctgcattcatgtgtttgtttttaatcaggtcaaccaggaaggtcagacccgctttcgcgccagcgttatccacgcccacgtctttaatgtcgtacttgccgttttcatacttgaacgcataacccccgtcagcagcaatcagcggccaggtgaagtacggttcttgcaggttgaacatcagcgcgctcttacctttcgctttcagttctttatccagcgccgggatctcttcccaggtttttggcgggttcggcagcagatctttgttataaatcaggcttaacgcttcaacagcgatcgggtaagcaatcagcttgccgttgtaacgtacggcatcccaggtaaacggatacagcttgtcctggaacgctttgtccggggtgatttcagccaacaggccagattgagcgtagccaccaaagcggtcgtgtgcccagaagataatgtcagggccatcgccagttgccgcaacctgtgggaatttctcttccagtttatccggatgctcaacggtgactttaattccggtatctttctcgaatttcttaccgacttcagcgagaccgttatagcctttatcgccgttaatccagattaccagtttaccttcttcgattttggcgagagcgctggcggaaaacatcatcgtcgttaatgcggataatgcgaggatgcgtgcacctgtttttattttcataatctatggtccttgttggtgaagtgctcgtgaaaacacctaaacggactctagtttctttatacggcaacctctttccatcctccttgcccctacgccccaccgtcgctttgtgtgatctctgttacagaattggcggtaatgtggagatgcgcacataaaatcgccacgatttttgcaagcaacatcacgaaattccttacatgacctcggtttagttcacagaagccgtgttctcatcctcccgcctcctcccccataaaaaagccagggggtggaggatttaagccatctcctgatgacgcatagtcagcccatcatgaatgttgctgtcgatgacaggttgttacaaagggagaagggcatggcgagcgtacagctgcaaaatgtaacgaaagcctggggcgaggtcgtggtaagcaaagatatcaatctcgatatccatgaaggtgaattcgtggtgtttgtcggaccgtctggctgcggtaaaagcactttactgcgcatgattgccgggcttgagacgatcaccagcggcgacctgttcatcggtgagaaacggatgaatgacactccgccagcagaacgcggcgttggtatggtgtttcagtcttacgcgctctatccccacctgagtgtagcagaaaacatgagttttggcctgaaactggctggcgcaaaaaaagaggtgattaaccaacgcgttaaccaggtggcggaagtgctacaactggcgcatttgctggatcgcaaaccgaaagcgctctccggtggtcagcgtcagcgtgtggcgattggccgtacgctggtggccgagccaagcgtatttttgctcgatgaaccgctctccaacctcgatgctgcactgcgtgtgcaaatgcgtatcgaaatctcccgtctgcataaacgcctgggccgcacaatgatttacgtcacccacgatcaggtcgaagcgatgacgctggccgacaaaatcgtggtgctggacgccggtcgcgtggcgcaggttgggaaaccgctggagctgtaccactatccggcagaccgttttgtcgccggatttatcggtagcccaaagatgaacttcctgccggtaaaagtgaccgccaccgcaatcgatcaagtgcaggtggagctgccgatgccaaatcgtcagcaagtctggctgccagttgaaagccgtgatgtccaggttggagccaatatgagcctgggtattcgcccggaacatctactgccgagtgatatcgctgacgtcatccttgagggtgaagttcaggtcgtcgagcaactcggcaacgaaactcaaatccatatccagatcccttccattcgtcaaaacctggtgtaccgccagaacgacgtggtgttggtagaagaaggtgccacattcgctatcggcctgccgccagagcgttgccatctgttccgtgaggatggcactgcatgtcgtcgactgcataaggagccgggcgtttaagcaccccacaaaacacacaaagcctgtcacaggtgatgtgaaaaaagaaaagcaatgactcaggagatagaatgatgattactctgcgcaaacttcctctggcggttgccgtcgcagcgggcgtaatgtctgctcaggcaatggctgttgatttccacggctatgcacgttccggtattggttggacaggtagcggcggtgaacaacagtgtttccagactaccggtgctcaaagtaaataccgtcttggcaacgaatgtgaaacttatgctgaattaaaattgggtcaggaagtgtggaaagagggcgataagagcttctatttcgacactaacgtggcctattccgtcgcacaacagaatgactgggaagctaccgatccggccttccgtgaagcaaacgtgcagggtaaaaacctgatcgaatggctgccaggctccaccatctgggcaggtaagcgcttctaccaacgtcatgacgttcatatgatcgacttctactactgggatatttctggtcctggtgccggtctggaaaacatcgatgttggcttcggtaaactctctctggcagcaacccgctcctctgaagctggtggttcttcctctttcgccagcaacaatatttatgactataccaacgaaaccgcgaacgacgttttcgatgtgcgtttagcgcagatggaaatcaacccgggcggcacattagaactgggtgtcgactacggtcgtgccaacttgcgtgataactatcgtctggttgatggcgcaagcaaagacggctggttattcactgctgaacatactcagagtgtcctgaagggctttaacaagtttgttgttcagtacgctactgacagcatgaccagccagggtaaagggctgagccagggttctggcgttgcatttgataacgaaaaatttgcctacaatatcaacaacaacggtcacatgctgcgtatcctcgaccacggtgcgatctccatgggcgacaactgggacatgatgtacgtgggtatgtaccaggatatcaactgggataacgacaacggcaccaagtggtggaccgtcggtattcgcccgatgtacaagtggacgccaatcatgagcaccgtgatggaaatcggctacgacaacgtcgaatcccagcgcaccggcgacaagaacaatcagtacaaaattaccctcgcacaacaatggcaggctggcgacagcatctggagtcgcccggctattcgtgtcttcgcaacctacgccaagtgggatgagaaatggggttacgactacaccggtaacgctgataacaacgcgaacttcggcaaagccgttcctgctgatttcaacggcggcagcttcggtcgtggcgacagcgacgagtggaccttcggtgcccagatggaaatctggtggtaatagcaaaacctgggccggataaggcgtttacgccgcattcggcaaccaacgcctgatgcgacgcttgcgcgtcttatcaggcctacaacggctgtcaaatgtaggccggataaggcgtttacgccgcatccggcataaaaacaggttgtcattatctgaaaggggcgaaagcccctctgattatcgggtttagcgcgctattgcctggctaccgctgagctccagattttgaggtgaaaacaatgaaaatgaataaaagtctcatcgtcctctgtttaagtgcagggttactggcaagcgcgcctggaattagccttgccgatgttaactacgtaccgcaaaacaccagcgacgcgccagccattccatctgctgcgctgcaacaactcacctggacaccggtcgatcaatctaaaacccagaccacccaactggcgaccggcggccaacaactgaacgttcccggcatcagtggtccggttgctgcgtacagcgtcccggcaaacattggcgaactgaccctgacgctgaccagcgaagtgaacaaacaaaccagcgtttttgcgccgaacgtgctgattcttgatcagaacatgaccccaagtgccttcttccccagcagttatttcacctaccaggaaccaggcgtgatgagtgcagatcggctggaaggcgttatgcgcctgacaccggcgttggggcagcaaaaactttatgttctggtctttaccacggaaaaagatctccagcagacgacccaactgctcgacccggctaaagcctatgccaagggcgtcggtaacagcatcccggatatccccgatccggttgctcgtcataccaccgatggcttactgaaactgaaagtgaaaacgaactccagctccagcgtgttggtaggacctttatttggttcttccgctccagctccggttacggtaggtaacacggcggcaccagctgtggctgcacccgctccggcaccggtgaagaaaagcgagccgatgctcaacgacacggaaagttattttaataccgcgatcaaaaacgctgtcgcgaaaggtgatgttgataaggcgttaaaactgcttgatgaagctgaacgcctgggaagcacatctgcccgttccacctttatcagcagtgtaaaaggcaaggggtaattacgccccacagtgctgattttgcaacaactggtgcgtctcctggcgcacctttttttatgcttccttcctgggatatgagcgattttttatagtaactcacttcttcttcactaagaatatccattatctcaatgccttatcagagattcttttcctttcgccggtagtgtctggacattcaggctacttttccaggttattttatttctgttatgcagaggttttatgataagtcatatcctaaattctggcggcaataactctttgatgaaacatgatgtggtgcaaggaaataatatagtagatcttgatttactacgtaatttaaatggggtgccaggtttaaacagagataactttatttatatcagcaatattttttcaaatataaaacaacggaacgaaaaaatcatgcaataaatatgtttcgtgaagtctcaatcagtaatgatactataagtgtaaaattctacagaaatgaaaaaaattgaatgcgcttgcaattttctgatggataaagatgcgcaggggtatatcgacctgtctgatttggatttaacaagttgtcattttaaaggtgacgttataagcaaggtgtcttttttaagtagtaatctacaacatgtaacattcgaatgtaaagaaattggggattgcaattttactactgcaatagttgataatgtcatatttagatgtcgacgtttacacaatgtgatttttatcaaagcgagtggtgaatgtgtcgatttcagcaaaaatattcttgatacagttgacttcagccagagtcaacttggtcatagtaattttcgcgaatgtcagattagaaatagtaacttcgataattgttatctttacgctagccacttcaccagagcagagtttctgtctgccaaagaaataagttttattaaaagcaatttgacagctgttatgtttgattatgtgcgaatgagcacagggaattttaaagattgcattacagaacaattggaattaactattgattatagtgatatattttggaatgaagatctcgatggttatatcaataacattataaaaatgattgatacattgccagataatgcaatgatattgaaatccgttctggccgtaaaactggtgatgcaattaaaaatacttaatattgttaataaaaactttattgagaatatgaagaaaatatttagccattgtccttatataaaagatcccattatacgcagttatatccattctgatgaagataacaagttcgatgattttatgcgtcaacatcgattcagtgaggtgaatttcgatacccaacagatgatcgattttattaacagatttaatacgaataaatggctaattgataaaaataacaatttttttatccaacttatcgatcaggccttacgaagtacggatgatatgatcaaagcaaatgtttggcatctttataaagagtggattcgtagtgatgatgttagtcctatatttatagaaactgaagataatttaagaacctttaacacgaatgaattaacacgaaacgataatatctttatcctgttctccagtgtcgatgatgggccagttatggtggtaagctcccagcgcttacatgatatgttgaatcctacaaaagataccaattggaattccacgtatatctacaaatccagacatgagatgttgcctgttaatcttactcaggaaacacttttcagctccaaatctcatggtaaatatgcgcttttccccatttttactgcgagttggcgagctcatcgtataatgaataagggtgtttaagtaaaggaaaacatcaccgttcctggcatcctggacggtgatgcccctacggttgccctcgccagcacgggcatcggtaaagcgtaaggttcaacatcgttttaccacttcatgcgattgttgcgtttttgttgcgtattagatcacttaatttgctttacatctcccgtaaacacttttctgcgatacaatgcctttacgttatgtaacggagagttcggcatgagtcaccccgcgttaacgcaactgcgtgcgctgcgctattgtaaagagatccctgccctggatccgcaactgctcgactggctgttgctggaggattccatgacaaaacgttttgaacagcagggaaaaacggtaagcgtgacgatgatccgcgaagggtttgtcgagcagaatgaaatccccgaagaactgccgctgctgccgaaagagtctcgttactggttacgtgaaattttgttatgtgccgatggtgaaccgtggcttgccggtcgtaccgtcgttcctgtgagtacgttaagcgggccggagctggcgttacaaaaattgggtaaaacgccgttaggacgctatctgttcacaagtagcacattaacccgggactttattgagataggccgtgatgccgggctgtgggggcgacgttcccgcctgcgattaagcggtaaaccgctgttgctaacagaactgtttttaccggcgagtccgttgtactaagaggaaaaaaatatggagtggagtctgacgcagaataagctgctggcgtttcatcgcttaatgcgtacggataagccaattggcgcgttactgctgctctggccaacattatgggcgttgtgggtggcgacaccgggcgttccccagctctggatcctggcggtgtttgtcgcgggtgtctggctgatgcgcgctgccggatgtgtggtgaatgattatgctgaccgcaagtttgatggtcatgttaagcgcacggcgaaccgaccacttcccagcggcgcggtaacagagaaagaggcgcgcgcgctgtttgtcgtgctggtactgattagctttttactggtgctgacgctgaatacgatgaccattctgttgagcattgccgcgctagcgctggcgtgggtgtacccgtttatgaagcggtatacccatctaccgcaagtggtgctgggcgcggcgtttggctggagcattccaatggcttttgccgctgtgagtgagagcgtgccattgagttgctggttaatgttcctcgccaatattctctgggcggtggcttacgacacgcagtatgcgatggttgaccgcgatgatgatgtgaagattggcattaaatccacggcaatcctgttcggccaatacgataaattgattattggtattttgcagattggcgtactggcactgatggcgatcatcggtgagttaaatggcttaggctggggatattactggagtattctggtggctggcgcgctgtttgtttatcaacaaaaactgattgccaaccgcgagcgtgaagcctgctttaaagcatttatgaataataactatgttggtctggtactatttttagggctggcaatgagttactggcatttctgatgatgtaaaaaagccggatgatcatccggctttcttctgggttgcctgatgcgcggcgcttctcaggcctacacaacacatcgcaatttattgaatttgcagattatggaaggccggataaggcgttttcgccgcatccggcaattctctctgattacccttcgccctgcgtcgcactctcaatcgtcaaacgcacgtcacttgtaatcaactccgccagcaactgataaaccttcatcgtttctgccggttcggcatcgccgctatcgctgatatacccttcatcacgcagtgtcagcaccagagaactgaacaccgccttgtcgaagaactccggcgcgttgatgccgtgcagcacggagagacgttgcgcgacggtgcggctctctttctccagcgtaccgcggttgatgctcgggttggcactcaacaaccagaaggtgatggcataacgttgcagcgtttcgcgcgcgcctgcggccagcagctgtagcgtgcgagaatgcgccgggttgatatgcaactcatcatcttgcagggtaatcagcccctgacgttgcatctcatttgccagcgcatcaataacgtccggcaactcgtcgcgatcccagcgcaggaacagctccgctttcagcattgggtaaagcacattgacgtgctccatcaatacgtcgcgggagatgtggcgatgctgggtgacgattgccgccatcaggctaggcagcaccaacatatgcgcaatgttgttgcgatagtaggtcatcagcaccgcttgctcgcgcggcagaatgatgatgtcgccgattgtgtctttctcgacttcaaacttgttcatttgcagcgcgtgatcgataagctcgctggcgctggcactaggaacggtagagtccgtggagtagggcacgttgcgcatcagatccaggtagcagttgagttgctcggttaactgctcgcgggtgagactgcgctgacgacttgccagtagcgcagtacagcacaggttcatggcgtttgccgcgcctgcgttgttaatgcgtaccatcagatcggcagcaatattattgaccgtcggcgttaaccatgccggacgcaccgcttcgatgggatcgatagattcacgccagtcaggtacatgctggttaaggtaggtcatcaacggcattggttcaccgaagttgacgtaaccctgaccgagattacgcagcttgcttaaaccgcgcagcatctgcggcaggctctctttctctttcgtcgcgccgcgcagttctttggcgtaagtacccacttccatgacgtgctcataaccgatatagatcggaatcagcgtaatcggacgcgtgccgccacgcagcatcgcctgaatggtcatgctcagcgtaccagttttcggatccagcaaacgccccgtacgggaacgaccgccttccacgaagtactcgacggaataaccacggctgaacagttcgccgagatactcccggaaaacggtggaataaagtttattgcctttaaacgtacggcgaataaagaacgcccccagacggcggaaaatcggcccggcaggccagaaattcaggttgatcccggcggcgatatgcggcggcaccagcccctggtgatacagcacgtaagaaagcagcaggtagtccatgtgactgcggtggcaaggcacatataccagctcatgaccgtcgtgggccagctggcgaacgcgctcagcgttatggacgttgatgccctggtaaagtcggttccaggtgaagcccagaatacggtcagtcaggcgaatcatctcgtaagagaaattcgccgcaatctcttccatcagtgcaatcgcgttctgctgcgctttttcatgggagatttttttgctgcgcgcttcatcttctaccgctttggcaatggcgcgggaggcgagcagcttattaaacagatcctgacgagcaggcaaacgtgggcctacggcagccagacgttgacgggcaaagtgcatacgcgccacgcgcgccagtttctgagcgatagttttatccgtgccgtgttcatccgccatacggcgcaggctaacactcgggctgaaacgcacaaaactgtcgcgaccgagccacagtacagcgaaaaatttctgtacgccgttaagcatacgcagcggcgggttcacttcgcctttttcacgccccggcgcgcgaccaaacatcacgctcactggcaccatctgcacatccagatttgggttgctacggtgcaaatcgagatagtcgtggaacagcttaatagactcttctttcggcgtgtaataggtgaacacacgcggcccgccgtgaatgaacacatagcgcggcagtagcgtgccgtcgatttccagcggctctaacgggtcaggcaagtcatgtgccagacactgggcgcgcaacgtcagcaaatctgctttgctgttgtacggtaaaacgtacataattggacgagaggtatccagccccagttccggggcaggatctgccggaatagacttgctttttaccaggatgcttaatggtaaattcagtaatttgtagtaaattcgtggccagccggacataaacgatgtaaagcctctggttaataatgcaaatgcgcggcaaggatagcagaaagtcatgggaaattctgtggtatccgctcatgtttcgcgcggcgctacgcaaacccgaatcatcggatttaacggtacactgatattgacgctcataatgtaaaaaggttctttcaatggccaataataccactggattcacccgaattatcaaagctgctggctattcctggaaaggtttacgcgctgcatggatcaacgaagcggcattccgtcaggaaggcgtagcggtattgttggcggtggtcatcgcctgctggctggatgtggacgcgattacccgcgtgctgcttatcagctccgtgatgctggtgatgattgtggaaatcctcaatagcgccatcgaagcagtggttgaccgaattggctctgaataccatgagctttccggacgcgcaaaagatatgggatccgctgcggtgctgattgccattatcgtcgccgtgattacctggtgcattctgttatggagccattttggataacccttccagaattcgataaatctctggtttattgtgcagtttatggttccaaaatcgccttttgctgtatatactcacagcataactgtatatacacccagggggcggaatgaaagcgttaacggccaggcaacaagaggtgtttgatctcatccgtgatcacatcagccagacaggtatgccgccgacgcgtgcggaaatcgcgcagcgtttggggttccgttccccaaacgcggctgaagaacatctgaaggcgctggcacgcaaaggcgttattgaaattgtttccggcgcaagtcgcgggattcgtctgttgcaggaagaggaagaagggttgccgctggtaggtcgtgtggctgccggtgaaccacttctggcgcaacagcatattgaaggtcattatcaggtcgatccttccttattcaagccgaatgctgatttcctgctgcgcgtcagcgggatgagcatgaaagatatcggcattatggatggtgacttgctggcagtgcataaaactcaggatgtacgtaacggtcaggtcgttgtcgcacgtattgatgacgaagttaccgttaagcgcctgaaaaaacagggcaataaagtcgaactgttgccagaaaatagcgagtttaaaccaattgtcgttgaccttcgtcagcagagcttcaccattgaagggctggcggttggggttattcgcaacggcgactggctgtaacatatctctgagaccgcgatgccgcctggcgtcgcggtttgttttagttctctcttcatcaggcttgtctgcatggcattcctcactagttctgataaagcactctggcatctcgccttacccatgattttctccaatatcaccgttccgttgctgggactggtcgatacggcggtaattggtcatcttgatagcccggtttatttgggcggcgtggcggttggtgcaacggcgaccagctttctctttatgctgttgctgtttttacgcatgagcaccaccgggctgactgcgcaggcttatggtgccaaaaatcctcaggcattagcccgtacgctggtgcaaccgttgctgttggcgttgggggctggggcgttaattgcgctgctgcgtacgccgattatcgatctggcgctgcatattgttggcggtagtgaggcagtcctggaacaggcgcggcgctttcttgaaatccgctggttaagcgcaccggcgagcctggcgaatctggtattactcggttggttactcggcgtgcaatatgcccgtgcgccagtaattttgttagtggtcggcaatatcctcaacattgtgctggatgtctggctggtgatggggctgcatatgaacgtgcagggcgcggcgctggcgacggttattgcggaatatgcaacattgctgattggtctgctaatggtgcgtaaaatcctcaaactacgcggaatttccggcgaaatgctgaaaactgcctggcgaggaaacttccgtcgcttgctggcgcttaaccgcgatatcatgctgcgtagcctgttgttgcaactctgtttcggcgcgatcaccgtacttggcgcgcgactggggagtgacattatcgctgttaacgcggttctgatgacgctactcacctttaccgcctatgcgctggatggttttgcctacgcggttgaagcgcactccggtcaggcatacggtgcgcgcgacggtagccagttgctggatgtctggcgggcagcgtgccgccagagcgggatcgtagcgttactgtttagcgtggtttatttgctggctggggaacacatcattgcgttactgacgagcttaacccagattcagcagctggctgaccgctatcttatctggcaggtgattttgccggtggttggcgtctggtgttatctgctggacggcatgtttataggcgcaacgcgtgccaccgaaatgcgtaacagtatggcggtggccgccgcaggttttgcgctgacgctccttacgctgccgtggctgggtaatcatgctttgtggctggcattaaccgtctttctggcgttgcgcgggctttctctggcggctatctggcggcgtcactggcgcaatggtacctggtttgccgcaacgtgacggttaaaaattctgaataaataatcctaagccaaattgctgactacacttaatctcacgttcagaagaaaagtgaacgtactctcattcacaacctaacgatgaggtcttgattatgaataaagatgaagccggcggtaactggaaacagtttaaaggtaaagtgaaagagcaatggggcaaactgaccgatgatgatatgacgatcattgaaggtaaacgtgatcaactggtcggtaaaatccaggaacgttatggttatcagaaagatcaggcagaaaaagaggtcgtggattgggaaacccgcaatgaatatcgctggtaattaatccctcctgcccgacgtgtacaaggatgtacgccctcttaacgcggtttctttttcacctgcacagagtgatcatgctggcactgttcaggatgacgacacgcttccacttctacacatgccgcacagagcccatgtgcttcaatcacattatgccgcagggcaaaccccatttttgccgccagcgtatgcataatgtcttccacgccttctgcacactcttctttcactgcgccgcagcgatcgcaaataaacatggcactcgtatgggtgggctgatcgaacagatgacagagcacataactgttggtggattccaccttatgcacaaaaccttgctcaagcagaaaatccagcgcgcgataaaccgttggcggcttggcttgcggttcagcttcgcgcagtaaatcaagcagatcataagcgctgatagcgccatcctgcagactcatcaggcgcaacacttccaggcgctgtggggtcaggcgcacattacgctgcgcgcagattttttcagcctgcgctaataactcctgcgttgtggtcttttccatcgggcacctcaaagtgggggttaagaatgtccttactttaccatgttccaggaaaaacaccgagaacccttattgttgccgtaatgttgattttctgctttgtaggtaaggtgttatgttgccttgtcgtaccattatcaacacgataataattaataattcatttttaaataaattgcttcaagttaactcgctatttatttaactgggtttaaacgcatacctgtagttcagaaattatgagcgatttttgatagtgaccagatggcaaaagaattataaggaggacacggtacgacaaaaaaggtagatgaatcatgttgaagataatacccggtgcaactggatactttaataaaacactcaatagtaatcaattcgataatgaagatgcaatcaaagataaattagataatagaggtagtatcaaaggtaaattaaataatatatatggtaaatctattgattatgcagcgctgcgtcatcgggatataattattgcaaaaatagatttgtttattcaacgaatcacgcataatttatggcatgcacgtaaaaaaatgtgtttttaattgtgcaaataaatgatctcaaaatgtgggtcaataagtatattgacgattgcactgatgaggatttaaacgatcgtgactttattgcaagtgttgttgaccgggctatttttcatttcgcgattaatagtatatgtaatcctggggataataaagatgcaatgcccattgaacaatgtacttttgatgtagaaactaagaatgaccttccctccacggttcagctattttatgaggaatctaaggataatgaacctttagcgaatatacattttcaagcaataggttctggttttttaacgtttgttaatgcctgccaggaacatgatgacaacagcttaaaattatttgctagcctgttaattagtcttagttattctagtgcctacgcagatttaagtgaaacagtgtatattaatgaaaataatgagagctacctgaaagctcagtttgaaaaattatctcaacgtgatatgaagaagtacctgggagagatgaagcgtctggctgatgggggagaaatgaattttgatggctatctggataagatgagtcatctggtgaatgaaggaacgctcgatcctgatattttaagcaaaatgcgagatgctgcaccacaattaattagcttcgcgaagagctttgacccaaccagtaaggaagagattaaaatacttacagacacttctaaattaatttatgatttgttcggggttaaaagcgagaaataatatgtgaagttcttcgatagtatggaaggcattatataaaaggacccaatatttattgggttcttttttctctatcaatactattagcagggagatatatcaccagagtttaatgtgtgattttttatttatcgtcgaacctggattgtttatcattggccttaacaaagttaacggctaataagattatttccatcacttcgtgagagcttcatgccttgagaggatctcaattttcttttgcaatgagacaggcgcttcctgttgttatggtatagtaccccgctattgagcctcctgaatagtgatgctgaataacataaccccatgatatatcgataaaataatctctacatttgaaaatgcacggtaattctgaaatgcaaaaaatcaaccaaaccagcgcaatgcctgaaaaaactgacgttcactggagtggtcggtttagcgttgcaccaatgctcgactggacggacagacattgccgctatttcttgcgtctgctttcccgcaatacgttgctgtataccgaaatggtgaccacaggggcgattattcacggtaaaggtgattatctggcgtacagtgaagaagaacatccggtagcgttgcaactgggcggtagcgatccggcggcgctggcgcagtgtgcaaagctggcagaagcgcgcggatatgatgagatcaacctgaatgtcggctgcccgtctgaccgggtgcagaacggcatgtttggtgcgtgtctgatgggtaatgcgcagctggttgccgactgcgtgaaagcgatgcgcgatgtggtgagcattccggtgacggtgaaaacgcgtattggcatcgacgaccaggacagctatgaatttctctgcgatttcatcaataccgtttccggcaaaggcgagtgtgagatgttcatcatccacgcacgtaaagcctggcttagcgggttaagcccgaaagaaaaccgtgaaatcccgccgctcgattatccgcgtgtgtatcaactgaagcgtgactttccgcatctgacaatgagcattaacggtggtatcaagagcctggaagaggccaaagcacacctgcaacatatggatggcgtgatggtcgggcgcgaggcgtatcagaatccgggtattctggcggcggtagaccgggagatctttggttccagcgataccgatgccgatccggtggcggtagtgcgcgccatgtatccgtacattgagcgtgaactcagccaggggacgtatctcggccatattacccggcatatgttgggcttgttccagggtattcctggcgcgcggcagtggcggcgttatttaagtgaaaatgcccataaagcgggtgcagacattaatgtgctggaacacgcgctcaaactggtggcggataagcgttaacttttcaccaaaaagtagtcaaattcaccacgccctgcgcaccgtcgcggggcgttttgctgttaaatcaatagattatttttggcatgattcttgtaatgccagcaagagatttcatatttgggagagcatcatgctggaactactttttgtgattggcttttttgtcatgctgatggtcaccggcgttagcttgctgggcattatcgccgcgctggttgtggcgacggccattatgttcctcggcggtatgctggcattgatgattaagttgctgccgtggttactactggcgattgcggtggtgtgggttattaaggcgattaaagcaccaaaagtgccgaaatatcagcgttatgaccgctggcgttactaagggattgtgcggatgatcacaacctaaggttttatccttagaacaaaataggaattgataatcaaatctgtcactattgcgcctctaacagattcatcgtgctgtaccctacatacagccgaactataaaaagaaagggcttcccaggtggaagccctatttcttttatggaatcagcaggctggaaccttgcgtcgcccggctttccagaatctcatgcgcacgctgcgcatccttcagcggatatttctgctgctcggcgacatcgaccttaatcacaccgctggcaatcaaagagaacagttcattactggcctcggttaattcctcccgcgtggtgatatagccttgcagggaagggcgtgtcacatacaagctgcctttttgattgagaatgcctaagttcacaccggtaaccgcaccactactgttgccaaaactgaccattaagccgcggcgttgcaggcaatccaggctccgttcccaggtgtctctgcccacggaatcgtacaccacgcgcactttcttaccgccggtgatctcttttaaccgctcgaccagatcctcttcacgatagttaataacctgccacgcgcccgcttttagcgcgctctgcgctttttgcgcggttcctacggtgccgataagtttcgcgcccagggcttttgcccactggcaggcaattaagccaacgccgccagccgctgcgtggaacaggaactgttcatcgggtttaatttcataggttttgcgcagcagataataaaccgttaagcctttcaggaaggatgccgcagcttgctcaaaagaaattgccgcaggcagaatcgccgctttatccgcaataatgttatgcacagagctgtaagcgcctaacgcgctctgcgcatagactacacgatcgcctgccttaatatgctttacaccactgccgactttactcacgatgcctgctgcttcggtgcctaatccgctgggtaggcttggcggcgggtaaaggccgctgcggatatatgtgtcgataaaattgatgccgatggctttattttcgacctggatttcattctccgccggatcggcaggagtgaactctacggcttgaagtacttccgggccaccgtgcttgtgaaattcaattcgtgttgccatgtgtcctccagaacgtatcgtcagggtctgcttcatatgataaagtttcgacccattctttatctcggtaactccattcactatggcaggaaataaacccttcaacaaacagcaggctgaaccccgcgaacgcgatccacaagttgccgggctgaaagtgcctccgcacagcatcgaagcggagcagagcgtgttgggcggtttaatgctagataacgaacgctgggatgatgtagccgagcgtgtggtagcagacgatttttacacccgcccacaccgtcatatctttactgaaatggcgcgtttgcaggaaagcggtagccctatcgatctgattactcttgcggaaagcctggaacgccaggggcaactcgatagcgtcggtggttttgcttatctggcagagctgagtaaaaatacgccaagtgcggctaacatcagtgcctatgcggacatcgtgcgtgaacgtgccgttgtccgtgagatgatcagcgttgcgaatgagattgccgaagctggttttgatccgcaggggcgtaccagcgaagatctgctggatctggctgaatcccgcgtctttaaaattgccgaaagtcgtgcgaacaaagacgaagggccgaagaacatcgccgatgtgctcgacacaaccgtggcgcgtattgagcagttgtttcagcagccacacgatggcgttaccggggtaaacaccggttatgacgatctcaacaaaaaaaccgctggcttgcagccgagcgatttgatcatcgtcgccgcgcgtccgagcatgggtaaaacaacatttgcgatgaacctcgtcgaaaacgcggcgatgttgcaggataaaccggtacttatcttcagcctggagatgccaagtgaacagatcatgatgcgttctctggcgagcctgagccgcgttgaccagactaaaatccgtaccgggcagctcgatgacgaagactgggcgcgcatttccggcaccatgggtattttgctcgaaaaacgcaatatctatatcgatgactcctccggcctgacgccaacggaagtgcgttcccgcgcacgccgtattgcccgtgaacacggcggcatcgggcttatcatgatcgactacctgcaactgatgcgcgtaccggcgctttccgataaccgtacgctggaaattgcagaaatctctcgcagcctgaaagcactggcgaaagaactgaacgtgccggtggtggcgctgtcccagttgaaccgttctctggaacaacgtgccgacaaacgcccggtcaactccgacctgcgtgaatctggctctatcgagcaggatgcggacttgatcatgtttatctatcgtgatgaggtgtatcacgaaaacagtgatttaaaaggcatcgcggaaattattatcggtaaacaacgtaacggcccaatcgggacggtacgcctgacctttaacggtcaatggagccgcttcgacaactatgcggggccgcagtacgacgacgaataataattattttatgaattaggtaattaaagcaaacacttatcaaggaacacaaatgcaagcggcaactgttgtgattaaccgccgcgctctgcgacacaacctgcaacgtcttcgtgaactggcccctgccagtaaaatggttgcggtggtgaaagcgaacgcttatggtcacggtcttcttgagaccgcgcgaacgctccccgatgctgacgcctttggcgtagcccgtctcgaagaagctctgcgactgcgtgcggggggaatcaccaaacctgtactgttactcgaaggcttttttgatgccagagatctgccgacgatttctgcgcaacattttcataccgccgtgcataacgaagaacagctggctgcgctggaagaggctagcctggacgagccggttaccgtctggatgaaactcgataccggtatgcaccgtctgggcgtaaggccggaacaggctgaggcgttttatcatcgcctgacccagtgcaaaaacgttcgtcagccggtgaatatcgtcagccattttgcgcgcgcggatgaaccaaaatgtggcgcaaccgagaaacaactcgctatctttaataccttttgcgaaggcaaacctggtcaacgttccattgccgcgagcggtggcattctgctgtggccacagagccattttgactgggtgcgcccgggcatcattctttatggcgtcagcccgctggaagatcgctccaccggtgccgattttggctgtcagccagtgatgagtctaacctccagcctgattgccgtgcgtgagcataaagccggagagcctgttggttatggtggaacctgggtaagcgaacgtgatacccgtcttggcgtagtcgcgatgggctatggcgatggttatccgcgcgccgcgccgtccggtacgccagtgctggtgaacggtcgcgaagtaccgattgtcgggcgcgtggcgatggatatgatctgcgtagacttaggtccacaggcgcaggacaaagccggggatccggtcattttatggggcgaaggtttgcccgtagaacgtatcgctgaaatgacgaaagtaagcgcttacgaacttattacgcgcctgactagtagggtcgcgatgaaatacgtggattaatcgttctgtaatatttgattgtctgtgccggatgcggcgtgaatgccttatccggccaataaaatcctaaaaattcaataagttgatgttctttcatgctcttataaaggtcgtgcctctggcggatgtacgtttgtcatgagtctcactctgttgctaattgccgttcgctcctgaacatccactcgatcttcgccttcttccggtttattgtgttttaaccacctgcccgtaaacctggagaaccatcgcgtgtttcaaaaagttgacgcctacgctggcgacccgattcttacgcttatggagcgttttaaagaagaccctcgcagcgacaaagtgaatttaagtatcggtctgtactacaacgaagacggaattattccacaactgcaagccgtggcggaggcggaagcgcgcctgaatgcgcagcctcatggcgctagcctttatttaccgatggaagggcttaactgctatcgccatgccattgcgccgctgctgtttggtgcggaccatccggtactgaaacaacagcgcgtagcaaccattcaaacccttggcggctccggggcattgaaagtgggcgcggatttcctgaaacgctacttcccggaaagtggcgtctgggtcagcgatcctacctgggaaaaccacgtagcaatattcgccggggctggattcgaagtgagtacttacccctggtatgacgaagcgactaacggcgtgcgctttaatgacctgttggcgacgctgaaaacattacctgcccgcagtattgtgttgctgcatccatgttgccacaacccaacgggtgccgatctcactaatgatcagtgggatgcggtgattgaaattctcaaagcccgcgagcttattccattcctcgatattgcctatcaaggatttggtgccggtatggaagaggatgcctacgctattcgcgccattgccagcgctggattacccgctctggtgagcaatagcttcagcaaaattttctccctttacggcgagcgcgtcggcggactttctgttatgtgtgaagatgccgaagccgctggccgcgtactggggcaattgaaagcaacagttcgccgcaactactccagcccgccgaattttggtgcgcaggtggtggctgcagtgctgaatgacgaggcattgaaagccagctggctggcggaagtagaagagatgcgtactcgcattctggcaatgcgtcaggaattggtgaaggtattaagcacagagatgccagaacgcaatttcgattatctgcttaatcagcgcggcatgttcagttataccggtttaagtgccgctcaggttgaccgactacgtgaagaatttggtgtctatctcatcgccagcggtcgcatgtgtgtcgccgggttaaatacggcaaatgtacaacgtgtggcaaaggcgtttgctgcggtgatgtaatgcaggaaagcaggctggagctacccagcctgcagtgaaattaaactgtcgtcgctttcactctttctttatagatgatttttttgatgccatcgttctacgtgagagataataaacgttgttagttcttttattgttaagcttatcccaattatctggaattccttatcctgtttttttgggtggagtaataatttctgcacatctaaccattattaaatttaataataagtatcgggtttgttacgatagaatatttctatatcctcaagaatatgctttgccttattgcctgtgactttctgagattcaattatagtatcgttaaattctaatgttaaagagaactcttttttccgctttgtgtaagtttaaccttatattgattaccaatatcaaataaaaaggtcctgtaatgagaataatcacctttaacctcctcggcaaaacagcaaagcgtgcaaatatacataaagtctttcttacccctgattttgttaactaaatcaataaatgcgtgaaaaactttacttgcaatagaacttgatacttcttctccaggtctaaaaaatcttttgcaatttttaactgtgtttctatgtataaaaagaaatctttggcataagagatatctttattatttagtgcatctagctcaacaggtaaagatgtcgttttgttgctattcacatatgatatattcatatcatcatctccatcgcgagtaataaaattaatcaccattgtagggtagggggctggtcaatcagaaatcatctttataaacttcgattgtttttgtaatgctgtatcattaagttcattaaatcgtacagcagataaatgttctatcaaatttcgctcatttgccgaggattcatcataataaacgtaaaattaatgtatccttacatcgagtaataaacattttttatacaaaaaaagacaggaacgtatttactgggttaaatataatcatcctgcttttcatcacaaaaaccgcagataatccttcctttccccggcagctggcgttatggtcagatggtttttgcaacaaatctcacaataaaaagtttcaacatactgactatttagggaaaaatatgcgcaagatcacacaggcaatcagtgccgtttgcttattgttcgctctaaacagttccgctgttgccctggccagttctcctagtccgcttaaccctgggactaacgttgccaggcttgctgaacaggcacccattcattgggttagcgtcgcacaaattgaaaatagcctcgcagggcgtccgccaatggcggtggggtttgatatcgatgacacggtacttttttccagtccgggcttctggcgcggcaaaaaaaccttcagcccagaaagcgaagattatctgaaaaatcctgtgttctgggaaaaaatgaacaatggctgggatgaattcagcattccaaaagaggtcgctcgccagctgattgatatgcatgtacgccgcggtgacgcgatcttctttgtgactggtcgtagcccgacgaaaacagaaacggttagtaaaacgctggcggataattttcatattcctgccaccaacatgaatccggtgatctttgcgggcgataaaccagggcaaaatacaaaaagccaatggctgcaggataaaaatatccgaattttttatggcgattctgataatgatattaccgccgcacgcgatgtcggcgctcgtggtatccgcattctgcgcgcctccaactctacctacaaacccttgccacaagcgggtgcgtttggtgaagaggtgatcgtcaatagtgaatactgacagagcgggagagcgtgatgctctcccgaatgctgtttttttaatcacacctttatcctttcgctgtcttgctgcaaactgattaagagagttttatcaaggagcagcacatgtggtatcaaaagacgctcacgcttagcgccaaatctcgtgggtttcatctggtaacggatgaaattctgaatcagctggctgatatgccgcgcgttaacatcggcttactgcatctgttgctgcaacatacctccgcctctctgacacttaatgagaactgcgatcccaccgtacgccacgacatggagcgttttttcctccgcaccgttcccgacaacggaaattatgagcatgactatgagggagcagacgatatgccttctcatatcaaatccagtatgctgggaacaagccttgtattgccggtgcataaagggcgtattcagaccggcacctggcaaggcatttggctgggggaacatcgcatccacggcggaagccgtcgcatcatcgcgacactacaaggggagtaaaaaatgaccattagcgagttgctacaatattgcatggcaaaaccaggcgcagaacagagcgtgcataatgactggaaagcgacgcagatcaaagtggaagatgtactgtttgcgatggtgaaagaagtagaaaatcgcccagctgttagcctgaaaaccagcccggagctggcggagctgctacgtcagcagcacagcgatgtgcgtccaagccgccatctgaataaagcgcactggagcaccgtgtatctcgacggtagcctgccagatagccaaatctattatctggtggatgcgtcttatcagcaggcggtgaatttactgccggaagaaaaacgtaaattgctggtgcaactctgaaaggaaaaggccgctcagaaagcggccttaacgattacagcatcggcttaaggaagcgtgccgtgtgacttgcttcgcactccgcgacggtttctggcgtaccggagacgaggatctcgccgccaccactgccgccttctggtcccaggtcgacaatccagtcagcggttttgatcacgtcgagattgtgctcaatcaccacaatggtgttgccctgatcgcgcagtttatgcagtacgtcgagcagttgctgaatatcggcgaagtgcagaccggtggtcggctcgtcgagaatatacagcgtctgcccggtgccgcgtttactcagttcacgcgccagcttcacgcgctgggcttcaccgccactaagggtggttgcggactgccccagtcgaatgtacgtcaggccaacgtccatcaacgtttgcagcttacgcgccagtgcaggtacggcatcaaagaactcacgcgcctcttcgatggtcatatccagcacttcgtggatggttttgcctttgtacttaatctccagcgtttcacggttatagcgtttacctttgcactggtcgcacggcacgtagatatccggcaggaagtgcatctccactttgatcacgccatcgccctgacaggcctcgcagcgtccgccacgaacgttaaagctgaaacgtcccggcgtatagccgcgcgcacgggattccggtacgcccgcaaacagttcgcgcacaggcgtaaacacgccggtataggtcgccgggttagaacgtggagtacgaccaattgggctttggtcgatatcgatcactttatcgaaatgctccagcccctgaatatcgcgatacggtgctggttcggcgatggtcgccccattcaactggcgttgggcaatcgggaacagtgtgtcgttaatcagcgtgcttttaccggaaccactaaccccggtgatgcaggtaaacagacccaccggcagcgtcagcgtcacgtccttcaggttgttgccgcgtgcgcctgtcagcttcagcactttttccggattcgccggaacgcgtttcttcggcacttcaatcttgcgtttgccgctcatgtactgcccggtcaagctctccggcaccgccataatcgcttccagcggaccttctgcgaccacttcaccgccgtgaacacctgcgcccgggccaatgtcgatcacatggtcagcggcgcgaattgcgtcttcgtcgtgctccaccacaatcacggtattaccgagatcgcgcagatggataagcgtacccaacaggcgctcgttatcacgctggtgcaggccgatagacggctcgtccagcacgtacataacgccaaccaggcccgcaccaatctggctcgccagacggatacgctgtgcttcaccgccagaaagcgtttctgcgctgcgggaaagcgtcaggtaattcaggccgacgttaacgaggaatttcagacgatcgccgatctctttaaggattttttctgcaatcttcgcccgctgacctgcgagtttgagattgttgaagaattccatcgcatgaccaatgctcatgtcggagatagcaggcagcggcgtattctcgacatacacgtggcgcgcttcccgacgcagacgcgtcccttcgcagctggcgcacggacgattactgataaacttggctaattcttcgcgtaccgcgctggattccgtctctttatagcggcgctccatattatgcagcacgccttcgaacggatgacgacgaatggaggtatcgccacgatcgttcatgtatttgaattcaatgttttctttgccagaaccgtacaacaccactttatgcacgttcgcgctcaggctgccccacggcgcttcgacgtcgaacttatagtgatctgccaggcttttcagcatctggaaataatagaagttgcggcgatcccagccacggatcgcaccaccagccaggctcagttccggattctggatcactcgatcaggatcgaaatattgctgtacgccaaggccgtcgcaggtcgggcaggcccccgccgggttgttaaagctaaacagtcgcggctccagttcacgcatactgtagccgcaaattgggcaggcgaagttggcggagaacagcagctcttccgctttcgggtcgtccatatccgccactaccgcggtaccaccggaaagctccagcgcggtttcaaaactctcggcaagacgttgggtaagatcgtcacgcaccttgaagcgatcaaccaccacttcaatggtatgtttcttttgcagttccagttttggcggatcggaaagatcgcagacttcgccatcaatacgagcacggatgtagccctggcttgccaggttctccagcgttttggtgtgttcgcctttgcgctctttaatgattggcgcgagtagcatcagacgcttgccttccggctggctcagcacgttatccaccatctggctgacggtttgcgccgccagcgggacgtcgtggtccggacagcgcggctcgccaacgcgggcgaataacaaacgcaaatagtcgtggatttcggtgattgtccccaccgtagaacgcgggttatgagacgtgcttttctgctcaatactgatggcaggagaaagcccctcaatatgatcgacgtccggcttttccatcagactcagaaactgccgcgcgtaggcggaaagggattcaacgtaacggcgctgcccttcggcatataaggtgtcgaaagcgaggctggatttgccagaaccgctaagcccggtcacgacaatgagcttgtcgcgggggataacgaggttgatgtttttgagattatgggtgcgggcgccccgaacttcgatcttatccattcacctttcccggattaaacgcttttttgcccggtggcatggtgctaccggcgatcacaaacggttaattatgacacaaattgacctgaatgaatatacagtattggaatgcattacccggagtgttgtgtaacaatgtctggccaggtttgtttcccggaaccgaggtcacaacatagtaaaagcgctattggtaatggtacaatcgcgcgtttacacttattcagaacgatttttttcaggagacacgaacatggccagcagaggcgtaaacaaggttattctcgttggtaatctgggtcaggacccggaagtacgctacatgccaaatggtggcgcagttgccaacattacgctggctacttccgaatcctggcgtgataaagcgaccggcgagatgaaagaacagactgaatggcaccgcgttgtgctgttcggcaaactggcagaagtggcgagcgaatatctgcgtaaaggttctcaggtttatatcgaaggtcagctgcgtacccgtaaatggaccgatcaatccggtcaggatcgctacaccacagaagtcgtggtgaacgttggcggcaccatgcagatgctgggtggtcgtcagggtggtggcgctccggcaggtggcaatatcggtggtggtcagccgcagggcggttggggtcagcctcagcagccgcagggtggcaatcagttcagcggcggcgcgcagtctcgcccgcagcagtccgctccggcagcgccgtctaacgagccgccgatggactttgatgatgacattccgttctgatttgtcattaaaacaataggttatattgttttaaggtggatgattaaagcatctgccagccataaaaaagaagcctccgttatggaggcttctacgtatcaggtcaaaatcattggccattgtggcggtgtctgattcatctcttctatcatcacgctctcgatgttgtgccagatagcggtgatgtccgccattgtgatgccaagcaaccccattgcgaaccaacaggcggaaacaacgcccagaccgctgctgatcaccgcaagcccgacataatcagaccgacgaaaacggatgttgagtgtgctggccagaaacatcattacggcactaagaagttgccagcgaagaagaaccacgccagtggtgagggtagccatcaaacaattcctctgaaaagagccgatgccctggacagcgcggcgttgttcacgggaggcgtggtacactctggctatcgcggggcttgcagaacacaaaaatgaaacactctgtttgtttcattaattttgtgaactatatcacaattgattgtttgttagccatattaggccgtgacttttattgctgtacagattatgtggtttttcagtggcattaagggcatatcttcccgccgcctctgcattcctgtaggaaattaattttgaatatcaatgaattattttcatccaggtgacgattagaaaggtatcaatttcaaatcaggcaaaagtgctatttataccgtaagatttatctaaagacgtcggtacccagggttttcaccttgcaatggccgggtataaacaggcaggaaattgatagcaatgagtcatcgtgcacgacaccaattactggcgttgccgggcattatctttttagttctctttcccatcattcttagcctatggattgccttcctttgggcaaaaagtgaagtgaataatcagctccgaacctttgctcaactggcactggataaatccgagctggtcattcgccaggcagatttagtgagcgatgcagctgaacgctatcaggggcaagtttgcactccagcccatcaaaagcgaatgttgaatattattcgtggctatctttatattaatgaattgatctatgcccgtgataaccattttttatgcagtagcctgatagcgcctgtaaacggctatacgattgcaccggccgattataagcgtgaacctaacgtttctatctattattaccgcgatacgccttttttctctggctataaaatgacctatatgcagcggggaaattatgtggcggttatcaaccctctcttctggagtgaagtgatgtctgatgacccgacattgcaatggggtgtgtatgatacggtgacgaaaacctttttcagcttaagcaaagaggccagcgcagcaacgttttctccgctgattcatttgaaggatttaaccgtacaaagaaatggctatttatatgcgacagtttatagcacaaaacgcccaattgcagccattgttgcgactagttatcaacgtcttataacccatttttataatcatcttatttttgcgttgcccgccggtattttggggagtcttgttctgctattactctggctacgtattcgacaaaactatttatctcccaaacgtaaattgcaacgcgccctcgaaaaacatcaactttgtctttattaccagccaataatcgatatcaaaacagaaaaatgtatcggcgctgaagcgttgttacgttggcctggtgagcaggggcaaataatgaatccggcagagtttattccgctggcagaaaaggaggggatgatagaacagataactgattatgttattgataatgtcttccgcgatctgggcgattacctggcaacacatgcagatcgctatgtttctattaacctgagcgcctccgattttcatacgagtcggttgatagcgcgaatcaatcagaaaacagagcaatacgcggtgcgtccgcagcaaattaaatttgaagtgactgagcatgcatttcttgatgttgacaaaatgacgccgattattctggctttccgccaggcaggttacgaagtggcaattgatgattttggtattggctactctaacttgcataaccttaaaagtttgaatgtcgatattttgaaaatcgacaaaagctttgttgaaacgctgaccacccacaaaaccagtcatttgattgcggaacacatcatcgagctggcgcacagcctggggttaaaaacgatcgctgaaggcgtcgaaactgaggagcaggttaactggctgcgcaaacgcggcgtgcgctattgccagggatggttctttgcgaaggcgatgccgccgcaggtgtttatgcaatggatggagcaattacccgcgcgggagttaacgcgcgggcaataaaattacaggcggtggcgataatcgctgggagtgcgatcaaactgccgacggaaaacgcgggagaaggtctgctggctgacataacccaggtccattgcgatatcaaaaatcggacgctcggtggtgcgcaactcaacggcggccagtaacaggcggcgttggcgaatgtaatcgccaagcgtctgatgcgtcaccgtgcggaacattcgttgcaagtaccacttactatagccacttttttttgcgactacatcaatgttaagcggctggtcaatatgctcgtcaatccatgcgataagatcctgaataattttctgatgggacataaatctgcctcttttcagtgttcagttcgttaattcatctgttggggagtataattcctcaagttaacttgaggtaaagcgatttatggaaaagaaattaccccgcattaaagcgctgctaacccccggcgaagtggcgaaacgcagcggtgtggcggtaagcgcgctgcatttctatgaaagtaaagggttgattaccagtatccgtaacagcggcaatcagcggcgatataaacgtgatgtgttgcgatatgttgcaattatcaaaattgctcagcgtattggcattccgctggcgaccattggtgaagcgtttggcgtgttgcccgaagggcatacgttaagtgcgaaagagtggaaacagcttagctcccaatggcgagaagagttggatcggcgcattcataccttagtggcgctgcgtgacgaactggacggatgtattggttgtggctgccttagccgcagtgattgcccgttgcgtaacccgggcgaccgcttaggagaagaaggtaccggcgcacgcttgctggaagatgaacaaaactaaagcgccacaagggcgctttagtttgttttccggtctttgtctttctctctatcccgctggtacacaggagggtttcccccgacgtcaacacacctcattcgagcacgtggtggaggttccggttggtgttgatgctttaattgtatgtcaccgacgtttcttcgccagtgtaaaagtatactttttaaccgcaatatttttgtcatctcagacgattttttatcgcaatcctgaacggtatacggctcgataacgctgcaatcttgcgcaccgacgataacgtttgcgcatcaattgcctggtttttcatcgtcaagacaataaaagagaaaaaagcagcaaacttcggttgaaaaagccgctatgatcgccggataatcgtttgctttttttaccacccgttttgtatgcgcggagctaaacgtttgcttttttgcgacgcagcaaattgtcgcaaacctggagcaggaagataacgtttcgctggcaggggattgtccgccacgcatcttgacgaaaattaaactctcaggggatgttttcttatgtctacgccaagtgcgcgtaccggcggtagtctcgacgcctggtttaaaattagtcaacgtggaagcactgtccgtcaggaagtggttgccgggttaacaacgtttctggcgatggtctacagcgtcatcgtcgttccaggtatgttgggtaaagcaggcttcccgcctgcggcagttttcgttgcaacctgtctggttgccggactcggttctatcgtgatgggtctgtgggctaatctgccgttggcgattggttgcgccatctccctgacagcgtttaccgcattcagcctggtgctggggcaacatattagcgtacctgtcgcgctgggtgccgtgttcctgatgggtgtgctgtttacggtaatttctgccacgggtatccgtagctggattttgcgcaacttgcctcacggtgtggcgcacggcacggggattggtatcggtctgttcctgctgctcattgccgctaacggtgtcggtctggtgattaaaaacccgcttgatggtctgcccgttgcgctgggtgatttcgcgaccttcccggtgattatgagtctggtaggtctggcggtgatcatcggcctggaaaaactgaaagtccctggtggcattctgctgaccattatcggtatcagtattgtcggtttgatcttcgatcctaacgtccatttctccggcgttttcgccatgcctagtttgagcgatgaaaacggcaatagtctgattggcagcctggacattatgggcgcgctgaatcctgtagtcctgccaagcgttctggcgctggtgatgacggcagtatttgatgccaccggaactatccgtgccgtcgccggccaggcgaacctgctggataaagatgggcagatcatcgacggtgggaaagcactgaccactgactccatgagcagcgttttctctggcctggtgggtgcggctccggcagcggtatacatcgagtctgcggcgggtacggcggcgggcggtaaaaccggtttgacggctatcaccgttggcgtgctgttcctcctgattctgttcctctctccgctctcttacctcgttccggggtatgcaacggctccggcgctgatgtacgttggcctgctgatgctgagcaacgtggcgaaaatcgactttgctgattttgttgatgcgatggcgggtctggttacggctgtattcatcgtgctgacctgtaacatcgtaacaggcatcatgatcggcttcgcgactctggtgattggtcgtctggtttccggcgaatggcgcaagttgaacatcggtacggtcgttatcgccgtggcgctggtgaccttctatgcgggtggctgggctatctaatctttcatcggattctgaaaacgggtggcaatggctgcccgtttttattttctccgcacattgtgtgagcttttgcgatattctgaaaaaaatgagaattcaggcataacgtctttctcagatcataaaaaacatcgcaaacagggaacgcatggaaatcttcttcaccatactgataatgaccctcgtggtcagcctgtccggggtggtcactcgtgtcatgccctttcagatcccgcttccgcttatgcaaatcgccatcggtgcgctactggcgtggccgacgtttggtttgcatgtggagtttgatcctgaactctttttagtcttgtttatcccgccgttgctgttcgctgatggctggaaaacgccgacccgtgaatttctcgaacatggtcgagagattttcggcctcgcgctggcgctggtggtggtcaccgtggtcggcattggcttccttatttactgggtggtgccgggcattccgctgatccctgcctttgcgctggcggcggtgctttctccgaccgatgctgtggcgctctccgggattgttggcgaagggcgcatcccgaaaaaaatcatgggcattttgcagggcgaagcgttgatgaatgacgcctccggtctggtgagcttgaagtttgccgtagcagtggcgatggggacgatgatcttcaccgtcggcggtgcgacggtcgaatttatgaaagtagccattggcggtattctcgccggttttgtggtgagctggctgtacggtcgcagcctgcgattcctcagccgctggggcggtgatgaacccgcgacgcagatcgtcctgctgttcctgctgccattcgcttcttatctgattgccgaacatattggcgtttccggcatcctcgctgcggttgccgccgggatgaccatcacccgctccggtgtgatgcgccgtgcgccgctggcaatgcgcctgcgtgcaaacagcacctgggcgatgctggaatttgtctttaacggcatggtgttcctgctgttaggtctgcagctgccgggtattctggagacgagcctgatggcagcagaaatcgaccctaacgtcgaaatctggatgctgtttaccaatattattctgatatatgcggcgctgatgctggtccgtttcggctggctgtggacgatgaaaaagttcagcaaccgcttcctgaagaagaagccgatggagtttggtagctggaccacacgagaaatcctgatcgcgtctttcgccggggtgcgtggggcgatcactctggccggtgtgctctctatcccgctgctcttgccggatggtaacgtcttcccggcgcgctatgagctggtgttcctggcggctggcgtcattctcttcagcctgtttgtcggcgtggtgatgttgcctattctgctacaacacattgaagtcgcggatcatagccaacaattgaaagaggaacgtattgcgcgagcggcaacggcagaagtggcgattgtggcgatccagaaaatggaggagcgtctggcggcggataccgaagagaatatcgataaccagctgcttacggaggtcagttctcgcgtcattggtaacctgcgtcgtcgcgccgatggacgtaacgacgttgaaagttccgtgcaggaagagaaccttgagcgtcgcttccgtctggcggcattgcgttctgaacgtgctgaactttaccacctgcgcgccacacgggagatcagcaacgaaacgctgcaaaaattactgcacgatctcgatttgcttgaagcgttgctaattgaggaaaatcagtaagccgaaagcgacgtaaccaggcccgaggtaatctgaaaaaggtgcaatcttttgcacctttaacaggttagctcgggctaacattcatgattctaaaacaaataaattatctctcttttaaagtcaattcattggctgttcttcgacttaacctcaatctgcatcttgcataatatctgcagtaatcttcatagcgactgcatgaagattatcctcagtttgactcatgccagtatgagtggcacaatcttcttcaaagaatttctgtagtgttaccaggatatcactattaatggagatattttcctcaccacggagaatggtaatacccattccctggacgctagcctcatcgaaattaacacgatagagacggatattaaacatccaggcttttgttaaaacagaacagttgaaatggcaattgcttaaattggcattattaaaattaacattagccatattagagtcggtacatataaccatttcgaggaacgtatttgttaaccgcgtaaaaaagagtttgctatcaattaagtttatattctggagggttgctttattcaggttgacacgagacagatcagcatgttcaaagttaattaaatcaagtttagagaagctaaggtcggctctaaataaattaatatatggcgctattactttataaagatttacctcagccatgtatgccatataaaaattactataatcaaggaaggtatttttaatattggctctattcattgttgcattgtagaattgaacatgcatagcggaacaactatttagagttccgtcagtcatttttatctgagcgaaattactgtcatcgagaatacaattatcaaaaagtattttttccattatggcgaaattaaaattcgttttatacatattacagtcctgaaaaatagcgttttgtagtctgcaacctgcaaaattgctattggataaatcttcatctttaatcacgatacctttcaggctaaggtgactaaaatcgtaaccaccatttactgtctgtgggatttcgatagtattattatggacggtgacattatttataaaatataccaccttaatactcacttccttatctttattaaggtaaactcttctcgtaattctatcgtcacatttattatttgcatgactagctatatctataaaatatttatgtattttcctgtccgtttctttcgtgatttttccacttggtaaactatcataaattcttttcattttctgaatcaagcctatcactttttcatgatcatccattttgaaaagagagagggctttattgtcaattaacgtgtttttatgatgtttgctgtaattatcactttttgttttctttgtatgacttggacttgtgacagagtggttatcgttaatcaggcaaagagggaaaaacatattatttaaaccattatagcgcataaaatatccttataattaacaagaaagaaaaggcatattctctgcattatcattttctacgactgtcaaaaatcgctcattttttaatgagtttatttgtttaatattatgggaaaaggtgatgcatttgggagaggaagagtattccccggtcagacgaccggggaaggggagagattaatgcgcgcggccttgctcaacgccaaagccggtctgggagcggataaactgcgcgcggaacagttcacgctcacgcgcgccttccgcactgttatcggttgcgctgaagaaccagatgccgaggaatgccacggtgatagagaacagcgccgggtattcatacgggaagatggctttttcgtgaccaaggatctgtacccaaatcgtcgggccgaggatcatcagtactactgcggtaatcagccccagccagccacccatcatcgcgccacgcgtggtcagtttgctccagtacatagaaagcagaatgatcgggaagttacagctcgccgcgatggcaaacgccagccccaccataaaggcgatgttctgattctcaaacagcacgccgaggataatcgcaatcacgccgaggatcagtacggtgattttacttacccgcagctcttcacgttcggtcgcgccttttttgaagacgttagcgtacaagtcatggctaaccgcggatgcgcccgccagcgtcagacccgcaaccaccgcgaggatagtggcgaaagcaaccgcactaataaaaccgaggaacaggttgccgcccactgcattcgccaggtgaacggccgccatgttgttaccaccaatcagatggcccgccgcgtctttatattccggattcgcaccaaccagcatgatcgcgccgaagccgataataaaggtcagaatatagaagtagcccataaacccggtggcgtagaacacgctcttacgtgcttcgcgggcatcgctgactgtaaagaagcgcatcagaatgtgcggcaagcccgccgtaccaaacatcagtcccagacccagagagagcgcggagatcggatctttcaccagcccgcccggcttcatgatgtcgacacctttcgggtgtaccgccatcgcttcactgaacagattgttgaagctaaagccgacgtgtttcatcaccataaaggccataaagctggcaccgaacagcaacagcacggctttgataatttgcacccaggtggtcgccagcatgccgccgaacaggacgtacatcatcatcagcacgccgaccagcaccaccgcaatgtgatagttaaggccaaacagcagctcgatcagtttacctgcgcccaccatctgggcgataaggtaaagcgccaccaccaccagagaaccacaggcgctaagaatacgaatcggcccttgtttcagacggtaagaggccacatcggcaaaggtgtagcgccccaggttacgcagacgttcggcaatcaggaacaaaatgatcggccagcccaccaggaagcccaggctgtaaattaagccgtcatagccggaggtaaacaccagcgcggagatccccaagaaactggcggcggacatatagtccccggcaatcgccagcccgttctggaagccagtgatattgccgcctgcggtgtagtagtcgctacgagaacgtacgcgtttacttgcccagtaggtaatgccgagcgtaaacacgacgaaaatcaggaacataataatcgcctgccagttcgttggctggcgctctacggccccgctaatagcatccgcggcgttagctgcgaaagggagtgtggcggcaagcgccgtcagaactcttttcatgatgcttgtacctcatgcagttatttcaacttgcttgtacctcatgcaggacttcattattaagacggtcgaattcgccgttcgcccgccagatgtagataccggtgagaacaaaggagatcacaatcactccaacaccaattggaataccgcgtgtgacgctggtgttcggattcagcggcgtgcccagccagccgggcgcgaaggcgatcagtaaaataaagccgatataaactgccagcataataatgctcaggatggtggcaaaccgttgccgtttttcgactaactccctgaaatgcgcattgtcttctatccgctgataaatagtgccattcatcacagattctccagaggtaatgtagggattgttttaattcccgctcccttatgggagaaggttaacgctcgggtaacccttgccgaatgtaggccggataaggcgtttacgccgcatccggcaatcaatgcctgatgcgacgctgtcgcgtcttatcaggcctacaaaccgttaccgactcgcatcgggcaattgtgggttagcttggcatcgcgatagcctgcttctcttcaagcagcttctcgactacgccaggatcggcaagcgtgctggtatcgcccaggttgctggtatcgcccgccgcaattttgcgcagaatacggcgcataattttgccggagcgggttttaggcagggagtcggtccagtgcagcacgtctggcgtcgccagcgggccaatctctttacgcacccagttgcggacttctgcgtacagttctggactcggttcctccccgtgattaagcgtgacgtaggcgtagatcgcctgacctttaatattgtgcggaatacctactacggcggcttcggcaatcttcggatgcgccaccagcgcgctctcaatctctgccgtccccagacggtgaccggagacgttcagcacgtcgtccacacgcccggttatccagtaatagccatcttcatcgcgacgcgcgccgtcgccgctgaaatacatatttttgaaggtggagaagtaggtctgttcaaaacgttcgtgatcgccaaacagcgtacgcgcctgacccggccaggagtcggtgattaccaggctaccttcggtggccccctccagcgggttaccttcgttatcgaccagcgccggttgcacgccgaagaacggacgtgttgcgctaccggctttcagctcggtagcgccaggcagcggggtgatcatgaaaccgccggtttcggtctgccaccaggtatcgaccaccggacatttctcgttgccgatttttttccagtaccactcccacgcttccgggttaattggctcgcccacggaaccgagaatgcgcaggctgctacggtcggtgccttcgatcgctttatcgccttccgccatcagcgcgcggatcgccgtgggtgcggtatagagaatattgacctgatgcttgtccaccacctgcgccatacgggcaggcgtcggccagttgggtacgccttcaaacatcagcgtggtcgcaccgcaggccagcgggccgtacagcaagtaactgtgtccggtcacccagcccacatcggcggtgcaccagtagatatcacccggatgataatcaaagacatatttaaaggtcagcgccgcgtacaccagataaccgccggtagtatgcagcacaccttttggcttaccggtagaaccggaggtgtagagaataaacagcggatcttcggcgttcatctcttccgcctggtgctgatcgctcgcttgctcaaccaggtcgtgccaccacaggtcgcgcccttcctgccagtcaattttcccgccagtacgcttcagtaccaccacatgctctacgctggtgacgttcgggtttttcagcgcgtcatcaacgtttttcttcagcggaatactgcgcccggcacgcacaccttcgtcggaagtgatcaccagtcgactgttggaatcaataatgcgcccggcaacggcttccgggctgaagccgccgaaaatcacgctatgcaccgcgccaatgcgggcgcaggccagcatcgcaaccgcggcttccggcaccatcggcatataaatcgccaccacatcaccttttttaatgcccagctcgagcagggtattggcgaagcggcagacgtcgcggtgcagctctttatagctgatatgtttgctctggctggcgtcgtcgccttcccagatgatggcggtacgatcgccgttttcttgcagatggcggtcaaggcagtttgccgccagattcagcgtgccgtcctcgtaccatttaatggacacattaccgggggcaaaggaggtgtttttcaccttctggtaaggtttgatccagtcaagaatttttccctgttcgccccagaaggtatcaggtacgttaatagattgttgatacatcgcctcgtactgctgagggtttatcaggcaacggtctgcgatgttggcaggaatggtgtgtttgtgaatttggctcatgcttttgttctccttgtaggatgttaataatatgtggcataagcgttaaatgtaggggtattggcagttttgtttagtatttgggcgacagatcacgcaaaagtagaattgtgcaaataaacggcagggtaatttttgaaggtcagcaacaaaagttgattaattctttgaggaacatgcagttatgcatgctgttgaaaaagaggaagatactgactaactctaaagtggtattttacatgcacttacaattgattaaagacaacattcacagtgtggttatttgttacacataggggcgagcaatgtcatgacagtgtaggtgcggttactgtcgtgaaaaacaataaaaaccgccattgcaacaatggcgcaattcggatgaagcccctatgacaaggataaaaataaacgcacgccgtatcttcagcttattgattccttttttctttttcacttctgttcacgctgaacaaacggctgctcccgcaaaacctgtaactgtggaagcgaagaatgaaacctttgccccgcagcatcccgatcaatatctctcctggaaagccaccagcgaacagagtgagcgtgttgacgccctggcggaagatccacggctggtgatcctgtgggcggggtatcccttcagccgcgattacaacaagccgcgtggacatgcttttgctgtgaccgatgtgcgtgaaaccctgcgtaccggtgcgccgaaaaacgctgaagatggtccgctaccgatggcatgctggagttgtaaaagcccggatgtggcgcgtctgatccagaaagacggcgaagatggctacttccacggtaaatgggcgcgcggcggtccggaaatcgtcaacaacttaggttgtgccgattgccataacaccgcctctccagagttcgccaaaggcaaaccggagttaaccctttcccgtccgtatgcggctcgcgcgatggaagccattggtaaaccttttgagaaagccggacgtttcgaccagcaaagcatggtttgcggtcagtgccatgtggagtattacttcgacggcaaaaacaaagcggttaaattcccgtgggatgacggcatgaaagtcgaaaatatggagcagtattacgacaaaattgccttctctgactggactaactccctgagcaaaacgccaatgctgaaagcgcagcacccggaatatgaaacctggacagcgggcattcacggtaaaaacaacgtgacctgtatcgactgccatatgccaaaagtgcagaacgccgaaggcaaactctacaccgaccataaaattggtaatccgtttgataacttcgcccagacttgtgcgaactgccatacccaggacaaagctgccttgcaaaaagtggtcgcggaacgtaagcagagcattaacgacctgaaaatcaaggttgaagatcaactggttcacgctcacttcgaagcgaaagcagcgctggatgcaggcgcgacggaagctgaaatgaagccaattcaggacgatatccgtcatgcccagtggcgctgggatctggcgatcgcttcccacggcattcatatgcacgcaccggaagaaggtttacggatgctcggtacggcgatggataaagcggcggatgcacgcaccaaactggcgcgcctgctggcgaccaaaggcatcacccatgaaatccagatcccggatatcagtaccaaagagaaagcccagcaggccattggcctgaacatggaacaaatcaaggccgagaagcaggacttcatcaaaacggtgatcccgcagtgggaagaacaggcacgtaaaaacggtctgttaagccaataaccccgttccgcctcgcaaggggcggaaaacacaatggagtgaatatgagcgtattacgtagcttattaactgccggggtgctggcgagcggcctgttgtggagcctgaacggaattaccgctacccctgcggcgcaggcatctgatgatcgctacgaagttacccagcagcgtaacccggatgccgcctgtctggactgtcataaaccagataccgaaggtatgcatggaaaacatgcttccgttatcaacccgaataacaaactgccggtcacctgcaccaactgtcacggccagccaagtccgcaacaccgcgaaggggtgaaagatgtgatgcgctttaacgagccgatgtacaaggttggagagcagaacagcgtctgtatgtcctgtcatctgccggaacagttgcaaaaagcgttctggccgcacgatgtccacgtaaccaaagtggcgtgcgccagctgccattccctgcatccacagcaagatacgatgcagacgttaagtgacaaaggacggattaagatttgcgtcgattgccacagcgatcagcgcaccaatccgaactttaacccggcgtctgttccgttgcttaaggagcagccatgacctggtctcgtcgccagtttctcaccggcgtcggcgtgctggcagccgtcagcggcaccgcagggcgcgtggtggcgaaaacgttgaatatcaatggggtgcgttacggcatggtgcatgacgagagcttatgcatcggctgtaccgcctgtatggatgcttgtcgggaagtgaacaaggtgccggaaggcgtcagccgcctgacgattattcgtagcgagccgcagggcgaatttcctgatgtgaaatatcgcttcttccgtaagtcttgccagcactgcgatcatgcgccgtgcgttgacgtctgcccgaccggtgcgtcttttcgcgatgctgccagtgggattgtcgatgttaatccggatctctgcgtcggttgtcagtactgcatcgccgcctgtccgtaccgcgtgcgctttatccatccggtcacgaagacggcggacaaatgcgatttctgccgtaagaccaatttgcaggccggtaagttgcccgcgtgcgttgaagcttgcccgaccaaggcgctgacgtttggcaatctggacgatcccaacagtgagattagccaactgctgcgccagaagcccacttaccgctacaagctggcgctgggaaccaaaccgaagctgtaccgcgtaccgtttaaatacggggaggtgagccaatgacgcagacttccgcatttcattttgaaagcctggtgtgggactggccgattgccatctacctgtttttgattggtatttctgctggtctggtgacgctggccgtgctgttacgtcgcttctacccgcaggcgggcggtgcagacagtacgttgctgcgcaccacgctgattgtcgggccgggcgcggtgatcctcggtctgttgatcctcgtcttccacctgacaagaccgtggaccttctggaagctgatgttccactacagttttaccagcgtgatgagcatgggggtgatgctgtttcagctctacatggtggtgctggtgctgtggctggcgaaaatctttgaacatgatttgcttgccctgcaacaacgctggttgccgaagctggggatcgtgcaaaaggttctgagcctgctgacgcccgttcatcgcggactggaaacattgatgctggtgctggcggtgttgttgggggcttataccggctttctgctgagcgcgctgaaaagctatccgttcctcaataacccgatcctgccggtgctgttcctcttctccggcatcagctccggtgcggcggtggcgctgatcgccatggcgatacgccaacgcagtaacccgcattccacggaagcgcagtttgtacaccgtatggaaatccctgtggtatggggtgaaatcttcctgctggtggcgttttttgtcggtctggcgctgggcgatgacggtaaagttcgtgcgctggtggcggcattaggtggcggtttctggacgtggtggttctggcttggtgtcgccgggctggggctgattgtgccaatgctgctcaaaccgtgggtcaatcgcagttccggcattcctgccgtgctggcggcgtgtggggccagtctggtcggcgtgttgatgctgcgctttttcattctctacgccggacagttgacggtggcgtaagccagaaaagaggtggtttctggacgtattccttcctgaagtcggttttctggcgttgttgttaagtctcggggtcaacgtgttgaccccgttgacggccttcgcgggagtgcggttgcgctggcctgccatgatgcgactcacttgcatcggcattctggcgcagttcgcgctcctgctgctcgcctttggcgtactgacgtattgttttctcatcagcgatttcagcgtcatttatgtcgcgcaacatagctatagcctgctgagctgggaactcaagctggcagcggtgtggggcggccatgaaggtagcctgctgctttgggtgctgctgctttccgcctggagcgcgctgtttgcctggcattatcggcagcaaaccgatccgctatttccgctgacgttagccgttttatctctcatgctcgccgcactgctactgtttgtggtgctgtggtccgatcccttcgtgcggatatttccaccagcaatcgaaggccgcgatctcaatccgatgctgcaacatcccggtcttatctttcatccaccgctgctttaccttggctatggcggtttgatggtagcggcgagcgtggcgctggcgagtctactgcgcggcgagtttgatggtgcctgcgcccgaatttgctggcgctgggcgttacctggctggagtgcattaacggcggggatcatcctcggttcctggtgggcctactgcgaactcggctggggcggctggtggttctgggatccggtggaaaacgcctctttattaccctggctttctgccactgcgctgctgcacagtttgtccctgacacgccagcgggggattttttgccactggagcctgttgctggcgatagttactctgatgctgagcctgctgggcaccttaattgtccgttctggcattctggttagcgttcatgcgttcgcgctggataacgtccgcgccgtgccgttgttcagcctgtttgcactgattagccttgcgtctctggctctgtatggctggcgagcgcgggacggtggcccggcggtgcattttagcgggttaagccgggaaatgttaatcctcgctacgctgttgctgttttgcgcagtgctactgatcgtgctggtgggaacgctttatccgatgatttacggcctgctgggctggggacgcctctccgttggcgcgccgtattttaaccgcgcgacgttaccgtttggtctgttgatgctggtggtgattgtgctggcgacgtttgtctctggcaaacgcgtgcagcttccggcgctggtagctcatgcgggcgtgctgttatttgccgctggggtcgtggtctccagcgtcagccgtcaggagatcagcctgaatttacagccgggtcagcaggtgacgctggcaggatacaccttccgttttgagtgcctcgatctacaagccaaaggcaattacaccagcgaaaaagcgatagtggcactgtttgaccatcagcaacgcattggtgaactgacgccggagcggcgtttttatgaagcacgccgtcaacaaatgatggaaccgagtattcgctggaacggcatccatgactggtatgcggtcatgggggagaaaactgggccggatcgttacgcttttcgtttgtatgtacaaagcggtgtgcgctggatctgggggggaggattgttgatgattgcgggcgcattgttaagcggatggcgggggaagaagcgcgatgaataaagggcttctcacgctactgctgttatttacctgttttgcgcacgctcaggtcgtagacacctggcaattcgccaatccgcaacaacagcaacaggcgttaaatattgccagccagttacgttgtccgcagtgccagaatcaaaacttactggaatccaacgcgccggtggctgtcagtatgcgccatcaggtttacagcatggtggcggaggggaagaacgaagtcgaaatcattggctggatgaccgaacgctacggagattttgttcgctataacccaccgttaacgggtcagacgctggtgttatgggcgctgccagtggtgttgttactgctgatggcactgatcctctggcgagtgagggcgaagcgatgaaacagcccaaaataccggtgaaaatgctgacaacactcacgatattgatggtatttctctgtgtcggcagttatctgttaagcccaaaatggcaggcggtacgtgcggagtatcagcgtcagcgcgatccgctacatcagtttgccagccagcaaaccccggaagcgcagcttcaggcattgcaggataaaatccgcgctaatccacaaaacagcgaacagtgggcgttactgggcgagtactatctgtggcaaaacgattacagcaatagcttgctggcgtaccgtcaggcgttgcaactacgtggtgagaacgctgaactgtatgcggcgctggcgacggtgctttattaccaggccagccagcatatgaccgcccagactcgcgcaatgatcgacaaggccctcgcgctggacagtaatgaaatcaccgccctgatgctgctggcttccgatgcgtttatgcaggcgaactacgcgcaagccatcgaactatggcaaaaagtgatggatctcaacagtccgcgagttaaccgaacacagctggttgagagcattaatatggcgaaattgttgcagcggagattggattaatcatctggtgatgaagattatgtcattgagctgcataaaaaataatcgaatgaacatatgccaaaaataatcactaatcagtattattgcagattaaacaaataaaaatctttccataacaaatggttattcattaatcctgccataaactcgcgttattatgcattaatgcagcgaaaagctctgttgttaaagggttgcgcaacataccgcgcaaatgatactgatcataagcgttaaaaaaatctacaaaccaacgcaacacaattcatgccccggcagtatgtcacgttctcgcgtttctgaacggggaacggcgctccattgaggaagtcattcatatgaaaaatataaaattcagcctggcctggcagattctgtttgctatggtgctgggcattctcctgggaagctacctgcactaccatagcgacagccgcgactggctggtcgtcaatttgctctctccggcgggtgatatcttcatccatctgattaaaatgattgttgtgccgattgtgatctccacgctggtggtgggtatcgcgggtgttggtgatgccaaacagctcgggcgtattggcgcgaaaaccattatctacttcgaggtgatcaccaccgtcgccatcattttggggatcactctggcgaacgtcttccagcccggtgccggggtggatatgagccagttggcgaccgtcgatatcagcaaatatcagagcactacggaagcggtacaaagcagttcccacggcattatgggcacgattttgagcctggtgccgacgaacattgtggcgagcatggcgaaaggcgaaatgctgccgatcatctttttcagcgtgctgtttggtctggggctttcttccctgcccgcgacgcatcgtgaaccgctggtgaccgtgttccgctccatctctgaaaccatgtttaaagtgactcacatggtgatgcgttatgcaccggtgggtgtgtttgcgctgattgcggtgacggtggctaactttggtttcagctctctgtggccactggcgaaactggtgctgctggtgcatttcgccattctgttcttcgcgctggtagtgctgggaattgtggcgcgcctgtgcgggttaagcgtctggatcctgattcgtattctgaaagatgagctgattctggcgtactccactgccagctctgaaagcgtgctgccgcgaattattgagaagatggaagcctacggagcaccggtgagcatcaccagtttcgtggtgccgaccggttactcttttaaccttgatggtagcacgctgtatcaaagtattgccgctatcttcatcgcgcagttgtatggcattgacctgtccatctggcaggaaatcattctggtgctgacgctgatggtgaccagcaaagggattgctggcgtgcctggcgtgagctttgtggtgttgctggcaacgctgggtagcgtaggtattccgctggaaggtctggcgtttattgctggtgttgaccgtatcctcgacatggcgcgtactgcgctgaacgtggtgggtaatgcgctggcggtgctggtgattgccaagtgggaacacaaatttgaccgtaagaaagcgctggcttatgagcgtgaagtgctgggcaaatttgataaaactgcggatcaataattgaagattgccggggatatccacccggcaatgtgtgaatgcctgatgcgacgcttgccgcgtcttatcaggcctacgccagacagcgcaatagcctgatttagcgtgattttgtaggtcggataaggcgtttatgccgcatccgacatcaacgcctgatgcgacgcttaacgcgtcttatcaggcctacgccagacagcgcaatagcctgatttagcgtgattttgtaggtcggataaggcgtttacgccgcatccgacatcaacgcctgatgcgacgcttgccgcgtcttatcaggcctacgccagacagcgcaatagcctgatttagcgtgattttgtaggtcggataaggcgtttatgccgcatccgacatcaacgcctgatgcgacgcttaacgcgtcttatcaggcctacgccagacagcgcaatagcctgatttagcgtgattttgtaggtcggataaggcgtttacgccgcatccgacatcaatgcctgatgcgacgcttgccgcgtcttatcaggcctatcttaaccgttggttaatttttcaaactcttcacacccggtatcaaacccttccatacagctcaggttcaaccagtgcagcgccttttgcttgttcttctcgataaaaccttcttcaccgtttaagaacatcattcccgcccagtactcggaataaccggttcgggaaattgcagagctgcgtttgaaataccaggttgccttgtcatcgtcggccttaatgcccacgccgttggcgtaaatcaaaccaagcagcatttgggcatcgacggcagagtcgttctccagatcttcgctggcgttttctaacaggctaattgcctttggataatccggtttacccgcttgagtatttaccagaatatgcgccagcgttacttcaccttctttactgcccgcttgcgccgctttctctgcaagaacttttgcttgtggatagtccagactgaccggattggtgattttgatctgcgccagcagcgcgcaggcatcagcatcaccgctgtcggcggctttctgtgcccaatattcggctttgctcaaatcgccggagctaaaccagctgtcggcaagaaaatattgtgcgcgtcggtccccggcctctgctgcctttaaatactggctgccaggctcggagtcgttggcgtgggcaaagaatgtcaaaaacaacatcaatgcgataatttttttcattttgataatacgattgggtagggagtaaccagtataaagagttcgaatggataaaaaaacagcctccgaaaggaggctgtagaaaggacggtattacgccagtgccgcttcgcgcaggcgagttttcaacttgttgtactcgtcaatcacgtactgctcggcggcgcgctgatcggcgatcggctcgacgcgaacggcgcagtatttgtactccggcgttttcgtaatcgggcttaagttttcggtaaccagctcgttacaggcaccaatccaccactggtaggtcatgtaaatcgcccctttgttcggacgatcgctgacctgcgcacgggtgataattttgcctttacggctgtgcacccaaaccaatgcctcatcttcaatacccagacgtttggcgtcttcggtattgatttgtgcgtagccaggttcatcagccagcgccgccagtgccgcacagttaccggtcatgctacggcaagagtagtgaccaacttcacgcaccgtactcagtaccatcgggtactcgtcggtgagtttgtcgattggcgctacccagtcgcaggtgaagaactgcgccagaccgttcggggtatcaaacttctctttaaacagataagaagtcccctgatcggcatcactagtatcgcggcaaggccactgaatgaagcccagttcgcccattttctcgtaagtcgcaccgtagaaatccgggcacagatgacgcaactcatcccagatctcctgggtgttgttgtagtgcatcggataacccatacgggtggcgatttcactgatgatttgccagtccgttttcagatcccatttcggttcaaccgccttgaagaaacgctggaagccacggtcagccgcagtaaacacgccttcatgctcgccccagctcgtactcggtaaaataacatccgccgcgctcgcggttttggtcataaagatgtcctgaacgataaccagttccagatcttcaaaggctttacgtactgcgctcagctccgcgtcagtttgtagcggatcttcgcccataatgtacgcggcacgcacttcgccatgcgctgcgcggtgcggcagctcgctgatgcgatagccggtatgcgctggcaggctttccacgccccaggctttggcgaatttctcgcggttagccggatctttcacgtactggtatcccggatacgtatccggcagcgcgcccatatcgcaggcaccctgaacgttgttctgaccacgaaccgggttaacacccgcatgcggcttaccgaggttaccggtcagcatcgcgaggctggtcagagaacgcacggtttccacgccctggtagaactgggttacacccatgccccacaggatggcggcgcttttcgcctgggcatacatccgtgccgcctgacgaatctcactggcgctgacgccggtgatatcttcaacgctctccggcgtgtagccttcaacgattttacgatactcttcaaagccttctgtacgactagcgacgaacgctttgtcgtacagattttcttcaataatgacatggcccatcgcattcaacagcgcgatgttgctgccgtttttcagtgcaatgtgcatgtcagcaatgcgcgcggtttcaattttgcgcggatcgcagacgataattttcgccccgttacgtttagcgttaattacgtgattcgccacgattgggtgggaatccgccgggttgtacccgaaaacgaacactaaatcggtattatcaatttcgttaatagcattgctcattgcgccattaccgacgctttggtgcagacctgcaacgcttgggccgtgtcagacacgagcgcagcagtcaacgttattggtaccaataacggcgcgcgcaaatttttgcattacatagttggtttcgttacccgtaccacggctggagccggtcgtctggatggcatccggaccgtacttctctttgatggcgctcaggcgctcggcaacgtaattcagtgcctcatcccaggaaacaggttcgagtttgccgccacgctggcgacggatcatgggggttttcaggcgcggggtcaggatctgggtatcgttaatgaagtcccagccataataacccttcagacacagggtaccctggttggttttcccctgcgctgcctccgcccggacgattttgccgttatcgacgaccaggttgattttgcaaccacttgcgcaataggggcaaaccgtgacgacttttttcatcggtctcgctccagttaatcaaatcacgcatacgcgctctcgactacagtatgcatcttttatgccacattttatgtggggtcattccctgatattacgggcactatttattcaaaactctgacgaaaaacaggctgtcgtcagttttgacgtgacgaaacgaaataccgcgtgacagccatcacgcggcagacattttattttttctcgacgacgggacctgcctgatacccgccgcccaggcttttcatcaactgaatgctttggatcacccggcggctgtccagcatcagtaaactcatctcttcggcaagcactggcaaccgggcttcggtggcctgtaagcggctggttaagccgcgctgataggcggcctcggcagcgcgctgggtaaagcgcgtggcttccacgcgttcagcctgcatttctcgctcgtcgttgagcgtttgcagacgcgtgccgttgacggcaacgtcacgcaccgcgttcagtacactctggttgtaacgttcaatcatcatgttgctggcggcgcgcgtgccttcgagattggcattcaaccgtccaccgtcaaacagcggcaatttcagacccgggatgaagttgaactggcgactggtttttttgaataaggtatgcagatggatggagtccagaccgaaaaacgctttgatatcaaagctcggatagaacaacgcccgcgcggaatccacctgatctaaactcgcctgaacataccagcgcatggcttgcagatccgggcgtctggcgagcaactcataagagagtgtcgccggaatgccggtctggacttgcggtaatgccaccggtctgatctccggcatatcgctggctcccgcgccaatcaatgcacgcagagattctcgcgtttcggtgatttgccctttgacggcaacaatttgtttatcgaccgccagaatctgtgcccgcgcgccgtggaaaggcacttgcgcttccagaccgtgcgccactttactctggtgcgctttcaccgcgtaatcaatcacatcgtgagtttgttctaacagatcgagcatctgatagctggcctgcatactgtaataaagctgcgctacgcccgtggccaggcttagctctactgctgcggtttctgccagcgcggcattatgcgcgccaatggcggcggcaaccgcactgcgatgcacaccccacaaatcaagatccagtccggcaaacaaacctactgtggcttccgtatagtacggcccgtccatacccagtgctggcgcatccatactataagggcttaaaaagccgttcgcgctgacacgttggcggttgagcatccctaacgctgcgacctgtaattgactaccggcatctaacaaatcggcctgggactgcgctttttcttcccgcagtttcgcttcggcgagggtgtgactaccacttagcgtccgttggatcagcgcatccagctgcgggtcattgagttgtttccaccactgcgcctgcggccagccggagctggcaagatgaatatcgtcggccagtttgatttgttccggtttgagctgttgatgaggtgcagaatccttacgtaccagggcacagccggaaatcagcgtcgtgctgccgagaatgctgcacaacagcagacgactaagttgacgattgatcattgcgtggctccttgtgcctgttccgtggcgggcgttaatgccggggctgtccagtctggcaagcgggcgaaaagctggcagacgtgttgctcctgttttaataaggtgggcaggatggcctgagaggcgggtgtctcttcaagcgttatttgaggagaacggctgagtgcggttgccagaccggcagcgtatttctccagggcgtcggcaaactgacctgctctgtccggctgtagtgcgttatccagcgcctgcgcgctgttccaggtggcatcccaggcgtgaagaagatcgcggccctgacgaataaccgtttggctacgttcaatcagtaatgcgcgttcttcgctgtccagttgacgctccagcgccacgcgttggcacatctcttcacaggcattaaacgccgcatgcagaccgatacgaatttgcagataagtgcgcagagccgtgacttcctgctggcgtgggatccgcattactttacttaacatacccagcgtgccagccagtttttgcggcagtgtgcgcgcttcactttcaggccagacaaaggtgtaaatcaccgcggacaccacggtaccaatgatgatacccagggcgcgatcgcgaatttccaccaggtcgtacactgggccaaaaacgttttcgagcgtggcgagcgcgaaggtgaccaccatctgtgtgccgatataagaagagcgttcagagctggtggcaatccatgcgcccaacaggaaaatcggtgccagcacaaacagcaattcgacaatattgtccagccagggcatgaccagtagcgtgaataacagcgccagaatcgcgccgcaaaaggccccgccaaaacgcagcaccatcttctggtagctgctaccgacatttgggttagcgacgatcacgcatgtcagcatacaggtgtgaatgccttcccagtccacgccgctgtaaaaggtgtaacagatcaaacaggcgagcagcgtttttaccgcgtagcgcatatagtctggattggtaaaagcatcggcggccatacttggcggtttggctgcgggcgttggcggcgtattcgggtccatctgacccagttgtaacaacgtctggcagatattctccaggttacattcccgtgccgccatcgcttcactttcactgatccgccagtcgctttgccagcactgaccttcagcaacggcatgctgcagcttgttgatttcactagctaatttttgtcggaattcaataattgcctgagaatcagcaaaagaggtgggatcgtagcgattcagcgtgctgtaaatgtaggttaccgttgccacgcagctttgccaccatgcgttttgagttcgccagttggcatcgtccgcgaggcaaaagacattgagtttttgtagcgccagcgcctctctttcaatccgcgtttcgggtagcggtgcgaggctgtctgtcaggtgactaatggcatcatcaagccgatcattaagcgcctgatgcatttggctaatggcacgactgggaaaccacagcacgccgattaacgtcatcagcaaggttggatagaggccaacaacgatacaccacagcgttaagcgcacgaccacttccggatagtcgagcatggcggggaaggtttgcccgtaaatagcgacaatggcgacggcgaaaaagaccagccccaagcgatgggtgcgcatcaaaaacatgcagcccatcaggatcggtccggcgatgatcaatcggatcaacggttcgccgtaactccatttgtagatcaaaaacaggctgccgatctccagcaccgtggcaaccacaaacaagatcgcgacaaatttggtgtaaaacgcgttgctctgaataccgtaaaacagcactgccaggcttaacgccacaaaagggatctcaaaggtcatgctgatcagaatcaccagcaggcagcctacccagagttgcacggtctgcggcacgcgacctggtcgccgctcgcttaactcttcatgaaagaacgccagcagcctgaccaccggtaatggcagggagttgagcgcgctcattattgcggctcaagattagcgactgcgctagcgccgatgcggaacatttccgggtcaggtttatcgaccatgattttgaccggaaaacgctgggcaacgcggacccagttaatagaacgagacactttcggcaggccgcccagcaccaggccgccgtcatccggtagcacgccgtagccaatgctatccactttaccctcgaaggttttgccgctgtcactcatcaggcgaatcgttgcgggtgtaccactgcgaatatttttcagatcggtttcgcggaagttggcgatcacataccagtgacgagtgtcgattagggtaaaaatagggcgcatggcagaagcaaattgcccgacggaggttttgagggaaatgacccggccatcaaacggcgcgcgaacggtcgccatttccagatgcagtttggtcagggcaatatccgcttcgaccgccgcacgctgggcaactaatgcatccacgccgctgacggcgctggcggcactctgcgcctgtaacaatacggcattaagatccgcttctgcggcgcgctgcgccgttcttgcacggtcaacatcttccgcactgacaaaaccttctttcagtaatggctcggtgcggcgtaatgtatctgtggcctgtttcgcggcggcacgggctttttctaccgtggcattaacgctgtcggcaccaaactgttgcgcgtcaacgctacgctgggtgagcataatttgcttatccagcgccgcgagggaggcttcagctttcgccagattggcttcgtacgggcgcgggtcgatgcggaacagcaaatcgccctgtttgactgcctggttgtcggtgaccgccagttctacaatgcggccgctgacttccggtaccacatcaatggtatctgcactcgcgtaagcgtcattagtacttggcgcactgtctacgcgccagataacgaaaacaagggcaaccagcgccaacgcaaccactaacagagcagggaatttactgcgaggagcttttttcggcgtactttccatgagcgcgtctcaaatagattagaaaaatgccagccagaacagcatggcgtagagagcaaaaagggcggtataaataattccgacaaatgccagattgatatttgcccgctgaataactcgcctcgtgatgagcgtcaaaataaggctggcaatggcgcagaaaaaccagctgggataataagcgccgatcaccgggattgccggagataatgagcatcccgaaaccatgaagacgggaattatccaggctgtttttttgagttgcatcgccatgcgagagagaactgttggcatattaaatacatcctgtctgctgcgaacaatatctgtagtgaatatcaatatccattgaaggcgtcagtatggctattttcttgatgaataaaaatagctttattcagccaccgcattcataacttatatattttatttattaattggctgtatatatttttaaaataaatacttttgggggcttcagcgcccccaaaagcgagtgacattaatttggggttacgatattcacccacaaatcgaaattatccagacaggcgataatttcttccagtttcgcgccattgccaataattttggctttcttcgcttttaccagatccgccattttggcttgtccggtcagcacggcgtgcagatcttcacggctgatgtagaaagaggcgtcggcttgcggttgcagcgttttccggtagttaagcacgctatcgttcagcgtcaggttgaggttatcgccgttgctcatattgaagttcaggctgatatttttacccgcagctttcgcgctatcgaggcgaacggccataaagtcgaacagcatttcgacgctcatcccgcgaatggtgtccggggaaccggtggtgccgtggctgaacttatgcaccccttcgcgcagctctttcgcgccggtcaggtagaaaccgcgccatgtggcggactcggcctgatagcccagctgttcaaagttattcgcttgcagattcttcgcgacctggtcacccgggttggcggcaatcacctgtttcagcagttctgcgctccagcggtaatcaccttgcttgttcgcttcttgcgccaggttgatgacacgggcagaaccgcccagcgcctgcacgtaacgtttacccatctccacctgaccatacggatgcaggttagccgggttaccgtcgtaatagccaagatagaagttatacaccgcgcgggcgttgtggctgacagaaccgtaatagccgcggctggcccagttattggcaagtgcaggcggcagcttaatcatgtcgccgatttcattcatggtgtagccctggttcgccaggtgcagggtctggtcgtgaatgtacttgatggtatcgcggtatttaccaatataatcattgatatgcttattgccccagaccggccaggtgtgcggcataaacagcacttccgcgtcgttaccccacatatccagcgtttcgttcagatactcggtccacttgctggtgtcgcgggttttcgcgccgcgcagagtgtagaagttgtgcagggtatgcgtggcgttctcggcggtacacagggctttcagggccggaatatagaagtgcatttcggctggcgcttcgctacctggggtcatcaggaagtcaaactccaggccgtcgataatcatcttctcgccagttctgacgatagttttcgtcggtgcaataatgctcgggtcgcccgttgccagcgtcacgccaaggccattacccacattgccttgcgcgttgtgcggcagtaacagaccgtaagagtagagcgcacggcggctcatgatgttacccgccagcacgttttcgctgatggcttcgtccataaagcctgcaggggcaatcacctgaactttgccggatttaacatcggcttcagagataatgcctttcacgccaccatagtggtcggtgtggctgtgagtgtagataacggcaacaatcggtttttgcggacgatgctggaagtaaaggtcaagtgcggcttttgcggcaggcggcgtcaccagcgggtcgataacaataatgcctttctcgccctcaacgaacgtaatgttagagatatcctggccgcgcacctgatacattttatcggtgactttgaacaggccagaaataccgttgatttggctctgacgccacaggctggggtttacggtttccggcgctgcggcattaatatcaaatttgtaatcgtccgcgcggtagtaaactttaccgttcgcatcacgcagaataccttcatccagcagcggggcgataaatccacgctgggcatcgtcaaaatcctgacgatcgctaaacggtaaacttttggcgtaattctgattaacctgttgggtatattgagtggcggctttcgcttcctctttcgcgttagcggtatttaccatcatgccgctggcggcagttaacgcaataacaatcctgctcaaacggaataaccgagagttattcatataaatctccatttatcatttatgtcgtaaatatgtaatccatgcaaaatacgtcatttaaagctggcgttatcataattgggaaattgcgactttaataagtggaagtgtgagcggaacgcgccattttattaggcatttgtgctgaagagggaaaattacagtaaaactatcattgcagaaaataatatgagtcgttttatgtgtttattatatatattgtacctgtcgttggcacagcgggacattgcgctactgtgccaacgttttactcatggggctttagcacagaactgtggcaaaaaacgttgatgcgccaatattgctgcaccctgagcgccattaaagtcagaagaactggcggcaataaagcgcacgacctgatgcggcagtggacggcgcaggtacttttgggtcatggcaacgagagtctcgcgtgggaaggcgggcatatccatcacgccaccgcccaggatcaccgcatcgggatcgaacagattaatgctggtggcaatggcccgtgccgcgttttcaagcagactctggacgaaaggggcgttttccgcatggacgaaaagatcgcgcaatgggtaatttcggggctgttgttcgtaccagcgtcttagcgccattccagagcaattggtttccaggcacccaggattgccacacgcgcagtgttgggtcatatctcccagggggatatgacccagttcgcctgccacaccgtgtgcacccgtccacggcgcaccgttcatccacactgcgaaccccatccccgtaccgagataggccgccagaaccagttgttgcgtaaggcggttttctactacgtcccaggagagttgcaggttaacgtcgcgggaaaactcaaccggacaattcagcgtattttcgagcttatcggcgagatcatataaatccgccgctgttaacggcaggttaggcgtagaaataatggtgcgtttatctttactgaccagcgccggaaatcccatcaccagaccatgacagcgagcgttaaagcgcctgagttgctcgtcaatcatttcgccgataccgctcaccaggccgggagcaatgacttctgcggtccgctttttttcgcagtgtagcgtttcaccttctgctgtccgcagacaaaagcggatatgcgttgcccccatatccacgcccgctacgacgttatgctgtttttgcatgaggctgtacctcgctttttgcagccagaatctgcgcggtcataattctccatgcttcgtcgatattttccgcatgattaaacaggccggaagtgccgacgataaagacatccgcccctgccgccatcagtttttcgtaagttgcctggttgcaggaaccgtccacctcaatttcgtactccagaccttctcgttcacgccatgccttcagttcggcaagtttatccagcatttcaggaatgaacggttgtccggcaaagccgggatcgacagtcatgaccgtaattttatcggccttatggatatagtatttcatggcctcaactggcgtctccgggttaaggatcagccccactttcatgtcatgacggcggatttcatcaatcaggcggaacgcctggccgttgatggtttccggatgcagagtgatgaaatctgctcccgcacgcgccagttgagcaatgtaatcctgcggccgcgtcaccatcagatgacagtcgagcggtttagttgccagttttttaacctgacttacgaagaacggactgagtgtcagattggggacaaagtgaccgtccatgatatcgatgtggaagtaatcggcatggctgtcgataaattcgatctgttctttaaatttcagcagatccatacacattaagctgggggagattttcatgttcaattccttacttactgataagacggtcaagggcgacagccgcgataattaatccgcccatcaccaccagttggtaataggtttgtacctgcaaaatattcagaccgttgttgatggtgccgatgatcaacccgccaatcaccacagagaaaatgcgccccttgccgccgaagaaactggtgccgccaatgatggcgctggcaatggcataggtttcaaaacccataccggcaagcggttctgcggcaccgagtcgtgcagtactgacgacgcctgccagacctgcacaaacaccggagatgataaacaccaccaggatgtggaatttcacgtcaatcccggaatagaacgcgctatttttgttgccgcccagtgcgtagatgttgcgcccgagccgcatacgcgttgtcagaaaccaaaggatgagcgcgacaattagactgaagataacggggacaggtatcccaattacgctggcggcaaagaagttcacgaagtcaaaactgaagccgtatacgctgttggcatcggagatcaccagcgtgatcccacggaaaatcgcgttggtgccaagggtgatgatgaacgggtgtagccccgtccagttgaccaggcagccgttgatcgcccccagtgcgccgccaaccagtacaccgccaatcatcgctgcgagaaacgggtcaacacctgccaacatcagtttggcggtcaccataccggaaagcgccagaatcgcgccaacgctgaggtcgataccagcgaccaggatagcgaaaaactcgcccatgccgatcaataccgtcacggagctttgaacaaaaatctgggtaatattattggtggtcagaaaatattctggactcaggctaccaaagatggcgacgatgatcgccaggataaaaaaggtgccgtatttatcccagaacagcgcaaagttgaacggtttcttctcgctcgcttcgctttttactcttgtggtaaagcccatgccataatctcctcttcgctcatgtcatcgcgattcgtcaggatttgcgtcagtcgtccttcgcagaacacggcgatgcggtcgcagacggtgataatttcaggtagttcagaactcaccatcaggatgacttttccgtcgtccgccagttggcgcatcactttgtaaatttcggctttcgcgccaacgtcgatgccgcgggtaggttcatcgaaaataatcacttccgggcaacagcacagccatttggagatcaggactttctgctgatttcccccggagagttcggtgatattctggtttacgctatgacatttcagcgccagcagttcgcgttgattttcagcggtacgttgctcgtcaacttcatgaaacaagcccatcgcgcctttatagccgccgtctttcagactgcggctgatcgccatgttctgagcgatggaaaagttggggaaaaaaccgttatcccggcggctttcagtgatgtaagccatcccttttttcacggcatccaggggactacgtggagagatatctttgccattaagacggatttctccgccagcgcgtttatccacgccaaacagacaattcatcagttcagtacgtccggaaccgaccagtccggcaaagcctaatatttctccccggcagacgctaaaactgatatcccggaccttttttctgtcacgactggtgacgttccgcacctcaaaaaccgtttcgtgcgcaaggttgctgacattctccttcatcgcgttaaaacggttttgcagttcgcggcctaccatcagacggacgatatcgtcattactcacatcgcttactatgccgctgcaaacgctgctgccgtctttcatcaccgtatagcggtcgcaaatacggcgaatttccgccaacttatggctgatatagacgatggccgtaccctctttacgcaactgattcatgatcagaaacagatagtccacctctttattggtgagactggaggtgggttcatccatgatgatgactttggcatcgagcatcagcgttttggcaatttctagcatctgcttgtggctgatagataaattcgccactttctcatctagatcaactttcaagcccacgcgtaataacatcatggcggcgcggacacgcatttctcgccagtcgataatattgacgccacagatttttttcgtcagatgacgaccaatatataaattttccagtacggttaattcatcaataacgctgagttcctgataaataatcccgataccgagttgtgccgctaatttatgatccagcttgttatagctaatgttattaatggtaatggtgcctttggtcggctcatgtattccggataaaactttcattagcgtggatttacccgcgccattttctcctagtaatgcatgtatttcaccaggataaaccgttaaattaacgctctttaatgcgtgaaccggaccaaaggacttgccgatccccgccatgcttatatatggcgtggccataaataacctctctgcacgaaatatcgtattattgcctgatggctacatttatcaggtctacgttcaggttattttgttggccggataagacacttcattagcatcatcatccggcatcattcagttttattgagtgaccaggatactatcgaccagtttaaattccggtgctttatccagcgggataaccttgccggatttctcagcgtcaaccatcagcttcagacccgttgcgccgatatccgccgggttctgggcaaccgtcgcggtcatttgtccggcttccaccattttgcgggcttccggaatgccatctgtaccgacgaccagcacttttcccgtttttccggcgtttgcgactgcctgagcaacacccattgccatcgtgtcattcgcgcaatagatcgctttaatattcggattacgttgcaacacgttagtggcgacatccagtgctttaatgcggtcccagtcggcaggctggctggcgacaagcttgatctggcttgcttttttgaaggcttcggtggcaccattacgacgcgcttcaccggaggcgttaccggctttaccctcaatgattgcgacttcaccaccttcagcgcccaatttgtcaataatgaagctcgcgcctttcgccccgacagcaacgttatcggtggtgacaaaagcttccacattgccgccagcttttttcagattatccatgtcgattttttcatcgagattaaccagataaatgccttttttccatgcgcgggcgacaggcatgaccagattcacactggataatggagcgaaggcgatacctttgtaatttttattactgagatcttcaaataactgcaattgagattgaaaatcgccttcactaggagaggcaaaaatatcaacgctgacgcccagtgtttttgcttcatcttcaatgccttttttcatatctacccaaaatgggttggagagggttttcaatacgacagcatattcggcggcagcaaaagcgctggtactcaacattaagcccacgagtgtgccgctgaaatatttcagatatttattcataataatgttctcacggtaaggggacaggtaactccgcgatggcggaattacctttttcttatttcagcgcgcctggactgaagaaatcaacaattgcgccggttttttgcatattaatattagcttgttcaatgttgagctgggcgacagagacaaaaaaagcgtccagcaaagttagttgtaatattcttgcgctggcattacgacctaataacggcgtttccggggctggactgcaaataatataatcggccagtttcgctatcggactatggtagctatgggttatacaaataatctttgccccgttcttttttgccagttctacggccgcttttacatcactggttcgcccggaatgggtcactaccagcacaacatctccttcctgtaacaagctagcggacatcatcatgatgtgagcatcaggataggcctgacagcgtacgccaatgcgcaagaacttgtgctgtacatcagcacagatagcattacttcctccggcaccgtacaaatcccgctgtctggcctgatagaaaaagcgggcggcacggtggatctcatcaacgttgacgatgctctgaccttccataatggtgcgtaaagtgatgttaaataccttattcaccacatcctgcggcgcttcatcaaaagccaactcggaaggcaatacctgttcactctgagaaaaataatcttccagcgcactgcgtaagttacgaaagccgctaaaccccagcagcttacttaccttaactatcatcgcttcagataccgccagagcttctgcgacatctttaattgcgggtgcacaactcaggttaccgggtttgagtaaccactccacgatgcggctttcattttctgtcattccttcctgcttcattcgcaggtaaggcgctaaccctataccgttcggaagcgcactatcaaactcactctggctcatcacgttctcttgtccttgaattgaagacgccactatatcaccacagcaagaacagaaaagatgctggcgacttcacaaaaaaataaaatttataaagtttattttattgtgaacaatggcgagtggcttaaaattttatttcatttaattagtttaaaaacatgatgttatttgtttttctggttttttagatgatagatgttgctggatggtgagtgtctttaacgctattgcgctgtcagatgtaactctgtaaaacagatcaggaaggcgtaattcatcgattttgggtgtttttaattcattaacatcacaaatgttttttgattgtgaagttttgcacggacggggaagatgaatgaaaaagattgcatttggctgtgatcatgtcggtttcattttaaaacatgaaatagtggcacatttagttgagcgtggcgttgaagtgattgataaaggaacctggagcagtgagcgtactgattatccacattacgccagtcaagtcgcactggctgttgctggcggagaggttgatggcgggattttgatttgtggtactggcgtcggtattagcatagcggcgaacaagtttgccggaattcgcgcggtcgtctgtagcgaaccttattccgcgcaacttagccggcagcataacgacaccaacgtgctggcttttggtagtcgagtggttggcctcgaactggcaaaaatgattgtggatgcgtggctgggcgcacagtacgaaggcggtcgtcatcaacaacgcgtggaggcgattacggcaatagagcagcggagaaattgagattcatccactacttgcatggatgagtaatgattaatgtggatagagtttctttttgaggttggctaatgaaacgctttccgctatttcttttattcaccctgctcacgctgtccaccgttccggcccaggccgatattatcgacgacaccattggcaatattcagcaggcgattaatgacgcttataaccctgaccgtgggcgagactatgaagatagccgcgacgacggctggcagcgtgaagtgagcgacgatcggcgcagacaatatgacgaccgccgccgccagtttgaagatcgccgcaggcagctggacgatcgccagcgccagcttgatcaggagcgtcggcaactggaggatgaagagcggagaatggaagatgagtatgggcgatgaggttgggtatggagcaggcatcgcccctcaccccaatggggagagggagaaaacgagcgcaatattcaatatcgagcacaatcggtcccctcgcccctctggggagagggttagggtgagggggccagcgcgcacattccctctcatcacgccaccccaatctccatcccatcaaaccccacctcaaacccactcggtagtgcgttttccatcagccacgcatcaaactggtggctgatatgggtcagaatcacccgtgggctgcggataacctgattcagcgcaagcacggtatttaaatcacagtgattacgcggtgcatccgcgcgcggcgggtgactgcaatccatcaccattacctgcggctgattattgcgtaaaaatttcagcgttttttccggcaagcctgcggtgtcagacagccacgccacccggctgtgtgccgtttccagcagataaccgaaggtcagtttactgtggttgagcggcaggggcgtgacctgtaacccctgcaaatcaaacaccacaaacggttccaccgtgtggctgaaatcaagcaggcccggatgtttaaacagatcgtcgcagccctgttcatccggcgggccgtaaaccgggatcggatcgccaacgccccagcgcagcggaaacagcccctggacgtgatccatatgataatgcgtcagcaaaaactgctggaagcttccggggctccagcgatcggcgagatcgtgcagcccggcgtcgatcagggtgattgcgtcgttaaacttcactacgccgctgcacggttggcggcgatactgcgggctgcgccgcgctctggcgcaggccgcacactcgcagccccatgccggaacgccctgtgcgccgccggtgccggtgagcgtgagggtcaggctcatgttacagcgccttggtgaagcggaagtggctctgctcgtagccttcgcgcagatagaaacggtgcgcgtcgtggcgcttcacgttggtgctaagttcggtcatttcggccccggcctggcgggcttcttcttctgcccacgccagtaacttactgccgacgttcagaccgcgcgcctgcggcattaccaccaactcctgaatttcgccgatccagttgacatgatgcagatgaaactgcaaatgcaggccgatcatgccgacaacttcgccatcaagcagcgccagatggtagcgcatgtttgggtcgcgcagattggcgttaaaacccacgcgaaacgcgtggtggtcaaactccgcctgttttagctcacaaatcagcgcgtaaaccgcgtcggtgtcgtactgcgtggccgggcgaagctcacaagcaggcatggtgtttctccttctgatggatcagcgtcagcagcgtgtcgacgctctggcgcaggctgccgtcattgttgagcgtatggcaatcctgtggagtatagcgggcggcgcgcgccaggcgggcgttaatttcactggcgttttcacggccacggttttccaggcgctggcggaggatctccgggctaacctgtaaacagacgggcagcagcgcgctttgatagcgcgcccgcgcctgcggcagatgggcgcgactgccgttgaccagcacgtcgaatccggcgtgcagccagagatcaatctcgacgccgacgccataatacagaccgttagcgtgccagcttaaggccaacagattttgccccgcgcgggtaaaaaactcctgctcgctcagggcgatatggttttcacttccggcgctggcatcgcgcgtgatgtagcgatgcgccaccagtaactgagtttgttcccgcaggcggagttccgccagcaggctgtctttcccggagccggacggccccattaaccaaatcagttttcccatcatcagaacacccttttaccctgacgccagacgtggtcgatatgaatatgattgtccttgcgatgcgccagcaccaggtcggcgcgtttgccctcgccaatcaccccgcgatcctggagattaagcgcctgcgctggatttttagtcaccagcttcaccgcctgcggcagcgtaaagcggttgctctggtcatcggcgacgcgaaatgccgcatcgagcaggctggcggggtagtagtcggaagagaggatatccagcaggccaagctgcgccagttcactggccgccacgttgccggagtggctgccgccgcgcacaatattcggcgcgcccatcagcacgttcatgccatgcttgcggctggcttccgccgcttcgaacgtggtgggaaattcggcgatcacgctgccaagctggtgagattcagcaacgtgggcgtgggtggcgtcatcgtggctggcaagcgcaatttttcgcgcgcggcacagggcggcgatggattcgcgattcggctggctccagcgtgcggcgagcgccagttgctcttcttcgtactgctgcatctgcgcatcagtgagggagtatttgccctgataatattcgcgatacttctcgcggttggcgaactggcgctggcccgggctgtggtccatcaggctcaccagcgtcaccggctcgcgctgcaccagtttttcaaacagcggcagcgtggtgtgatgcggcagttcgcagcgcagatgcagacggtgctcggcgcggttgacgccgcgtttctgcgtctcttcgatggcgttgatcatcttctccagattctccagccgatcgccgccgtcgcgcacgtcgccaattgccacggcatccagtacggtggtgatgccgctcgccaccatcagcgcgtcgtggctgctcatcgcgctgtgggcaggccagtcaactttcgggcgcggggtgaagaatttatccagattatcggtatgcagctcaatcagccccggcagcagccagccgccttcgccgtccatcgcctccggcaggcggctctggctttcggcaaaggcgcggatttcgccgttctgcacctccaggctaccgcttaccacctcgttttccagcaccagcttaacgttattgataatcatgaagaggctcccattgggtgttagctcaactagaggctcccattgggtgcaggcggtcggcgacgtcattacgtacagcttcgtcatggaagatgcctacgatggctgcgccacgggttttggcttcgcgaatcagttccaccaccgcggcgctgtttttggcgtccaggctggcggtaggttcgtcaagcagcagaatggggtagtcgacgataaagccgcgggcgatgttgacgcgctgctgttcgccaccggaaaatgtgcttggtgccaggtgccacaggcgttccggcacgttcaggcgggtgagaagacgcgcggctttagcggcgcaggcttcacgcggaacgccggtatcgagcagcggctgcatcaccacttccagtgcactgatacgcgggatgacgcgcagaaactggctcacccagccgacggtggttttgcggatttccaccactttgcgcgctggcgcggtgaccaggtctacccactcgtcaccgtgtttgatctggatttgaccttcgtcgggcagatagttggcgtacaggctgcgtagcagagtacttttgccgctgccggaatggccgtggagcaccacgcattcgcccgcgttgacggtgaggctggcgcgattgaggacgggcaggcgcacgccgttttgctggtgcaggatgaaggttttactgacgttttgtacgttaatcatttttcgcctcgtggttcgggtgtcggatgcgacgctgacgcgtcttatccgacctacggggagcgcatttgtaggccggataaggcgtttacgccgcatccggcaccggctcaattctgcaaaacgctactcaccagcagctgtgtatacggatgatgcgggtcgtcgagcacgcggtcggttaacccactctccaccacttgcccctgcttcatcaccagcaaacggtccgccagcaggcgggcgacgcctaaatcatgggtgacaatcaccaccgcgaggttcagctccaccaccaggccgcgcagcaggtcgagcaggcgggcctgcacgctcacatccagcccgccggtcggttcatccataaacaccagcttcggatgcgtcaccaggttgcgggcaatctgcaaacgctgctgcataccgccggaaaaggtggtcggcaggtcgtcgatccggttggcgggaatctccacctcttccagccacttctgcgcggtggcacgaatatcgccgtaatgacgtgccccggtcgccatcagccgctcgccgatattgccgcctgcgctcacctggcggcgcaggccgtcgagtggatgctgatgcaccacgccccattcggtacgcagcaggcgacggcggtcggcctcgctcattgcatacaggctacggttctcgtagtgaatttccccctgctgcggcgtcaggcgcgcggagatgctcttcagcagcgtggtcttcccggagccggattccccgacaatgcccagcacttcccccggccataaatcaaaagagacatcgctaaagcctttgcccggcgcgtaaaggtgggtcaggttattgacgctaagtaacggttgattcattggttttttgcctcgctctgttggcggcaataatcggtatcggagcagacaaacatgcggtttccggcgtcatccagcaccacttcatcaagatagctgtgggtgcttccgcagatggcgcatggctcatcccactgctgaacggtgaacgggtgatcgtcgaaatcgagactttccacgcgggtaaacggcggcaccgcatagatgcgcttctcgcgccccgcgccgaacagttgcagggcgggcatcatgtccatttttgggttatcgaatttcgggatcgggctcgggtccatcacgtagcgcccatttaccttcaccggataggcgtaggtggtggcgatatgaccgaagcgggcgatatcttcatacagtttcacctgcatcacgccgtactcttccagcgcgtgcatggtgcgggtttccgtttcgcgcggctcgataaagcgcagcggctcggggattggcacctggaagataattatctgatcttcggtcagcggcgtttcggggatgcggtgacgcgtctggataaccgtcgcatcgtccgtacgttccgtggtgtttaccccggtcacgcgcttgaagaagttgcgaatgctcacggcgttggtggtgtcatccgcgccctggtcaatcaccttcagcacgtcgctttcgccaatcacgctggcggtaagctgaatgccgccggttccccagccgtacggcatcggcatctcgcgcccgccaaacggcacctgataaccggggatcgccaccgcttttaagatggcgcggcggatcatgcgtttggtctgctcgtcgaggtaggcaaagttgtagccgctcagattagccatggttctgctcctgttgcagacgtttgagtagctccagttcggcctggaaatcgacgtagtgggggagtttgaggtgactgacaaagcctgcggcttcgacgttgtcggcatgtgccagcacgaactcttcatcctgcgccgggcctgtcgcgtgctcgccgtactccggggcttgcagagcgcggtcgaccagcgccatcgccatcgctttgcgctcgctcatgccgaacaccagcccgtagccgcgcgtgaagtgcggcggctcacccggcgggtcgataaaaccgttaaccatttcacactcagtcatcagcagttcgccgacgttcaccgcaaatcccagctcttccggcacaatgctcacgtcgatatagccgctgcggatctcgcctgcgaacgggtgattgcgcccgtaaccgcgttgggtggagtaggccagcgccagcaaatagccttcgtcgccgcgcatcaactgctgcaaacgggaggagcgactgcaggggtaaaccggcggcgtgcgggtgatgtcatccggctgtgcgccgctatcctcttcaaacttcgccagcccctgacgcgccagcaggctgaaaacgtgcgggctcggctgctgttcgctgtcggcggtggtcagcgtcggcgcttcgccgtttgccagcagggtaaaatcgagcaggcgatgggtgtagtcgtaggttgggccaagcagctggccgccgggaatgtctttataaacggcggagatacggcgttcgagacgcatcccggtggtgtcgagcggctcgcttaccgccagcttcgccaacgtggtgcggtaggcgcgcagcaggaaaatcgcttcaacgttatcgccgctggcctgtttcagcgccagcgccgccagttcgcggtcggcaatgccgccttcggtcatcacgcgatctaccgcgaggttaagctgctgttcaatctgggcgacgctcagttcgggcaaatcggtatcgcctcggcgtcggctctcttgcagggcgtgggcggcgtcgatcgccttctcgccccctttcacggcaacgtacatcagcacacctccacatgagtggttcgcggaatagccagcaggcgctcgccacaggtcaggatcaggtcgatgccgagcgggaacggatgcgggcgctcggtgagttcgtgcagaatgcactccggcagctgcggagcgatcattcgttcttcggcaatacccgcaccagtaaggcgcaacatgcgtccgccgctcaggctggcgacctgtaaaatcagcgtcgcacccgcttccggcgcaacggcggtgccggtggaaagggcgttgagctgttcgctggaaatcgcctcatccgtcaccgcgaaggtcgcctgttccggctggctgaccagcggcgcgttggtatgaaaacgcaggctctggttgacgatatcgttatttaatggggtagaaagccacaccggcgtgtcgttatcggccagcgtcagcagcacgctggtggtggcgatattcagcggttgccagccgcgtttgagctgatgcagggcgacaatcacgcccggctcgctcatggcctttaacaggcgacgaaaactgtgctgggcatcctgcacgggaagcataaaagcggtttccagggtcatgcgttgtctccgcgaaccatcgtaaagaagtcgacccggctggcgttcacttcggcctggcgtgcggcaatgcgtgccatacggtcagcgtccagcggggcaataagggtttcacttaagttttgaaagtggcgagattgctgcatcagcgcgtcaatcagcgcgcagcgttcggcgtgctgtttatcacgcccctgcacccagctgtagccgagcgtgccgtcagtcaggcgcacggcggcgcgggtcagcgtggcgtcgccggcaaaaaaacgttcgccggtgccgcccatccgcgcctgaatctgtaccaggccagtttcagcggcgcggatcacctcatagtcggcggtgatgtttagcgcgttcaggcgtgctgccagttcagccggttggctgtgcgccagcacggacatccagtgctggcgggtcgcggtatctgcgtgcattcagtgctccatagtgaattcaatcatgtcggcgcgcgtcaggctgacggagtactccgccgggctgctttcaccgtcacggtggttaagggtgcgcacgcacagcagcgggctcatattcgggatttcaagacgctggcactctttggcctgggcgcggcgggcgctgatccgcgtctggctgcggcgcagcgcaattccggtttgctcgcgcagaaaatcgtgcaggctgccgctgtcgaagcgttgcagcgtcggccagagggtgaggtccgcgaagtagtggtcgattaaacagagcgcgacgccgttgacacgacgcagggtgcgcaggtggatgacgttctccccctcggtaatccccagtgcgtcagcgacgtggccggacgcggggcgcaatacgctaagcagtttttcgctggtgggatggctgccctgatccagcagattctggctaaaacgcgcctgggcgttgagcgggtaatcgaacgggcgcatcagcaccagcacgccgacgccctgacggcgctgtacccagcctttttccaccagttggtcgatggcgcggcgcagggtgtggcgattcacctcaaagcgcgctgccagttgctgctcggcgggaagatagtcgccgcagcggtagtgttgacgaagctcctgctcaagttttgcggctatctcttgatagcgtgttgggtagctggtcggatgtgtagacaagtgcatagatatcaatgcctcgcttatcagataaagtgcttacgcaaccgttgagagaggaaatccagcaggctgaccgtgacgatgataagcaccatcagggcgcaggtttgttggaactggaaaccgcgaatcgcttcccacagggtgacgccgatcccgcctgcgccgaccatgccgacgacggtcgccgagcggacgttggattcgaagcgatagagggagtaggagatcagcagtggcatcacctgtggcagcacgccgtagaggatctcttcgagcttgttggcaccggtggcgcgaatgccttccaccgggccgggctcaatcgcttccaccgcttcggaaagcagcttggagagcacgccggtggtgtggataaacagcgccagcacgccagcacgccagcgaacgggccgaggccgacggcgaccacgaacagcatggcgaagaccatttcgttaatggcgcggcaggcgtccatcaggcggcgaacgggctggtaaacccaccacggcaccaggttttcggcgctcatcaggccaaaggggatggagagaaccaccgccagcgcggtgccccagacggcgatttgcagcgtgacggccatttcggtgaggtaatcctgccactggctgaaatcgggcgggaagaagtcggcggcgaacgtcgccatgttgccgccgtctttgatcagcgtaagcggggccatttccgcgccctgccacgagacgaccaacacggcgagtacaacggcccagctcagaagcgagaaccagctgcgcttgggtggggcgatggtgatggtttgcatgtttggctccggtctgtaggccggataaggtgcttgcaccgcatccggcatcaacgcctgcacattgtcggatgcgacgccggggcgtcttatccgacctacgatttactgcaccgctttactcacgctactcatcgcgcttagcgcgttgttcaggcggtccaggtcatccagctgcgcctgaatctcggtggtttttgccagcttgtcctgctcattcagtcctttattgcttttcacgccctgcatctctttaaacagcgcgagctggcgaatcggcaccagttgcaggtcgctggaagcgcggaatggcgcccagcccaggcgttccagcaccgctttttcttccggcgttttgccgtagttcataaagaagtcgtagatcttgtctttggtggtttcggaaagattcttgcgccagacgatcggatcgcctgggatcagcgggctcttccagatcaccttcagttctttcagcttctctggcgcggaggttttcagcttgtcgaggttttcggtgttgttggtggcaacatccacctgcttgttggcgacggccagcgcgttggtttcatgcccggcgttgacggtgcgcttgaagtcgctggcggagatattgtttttggcgaagacgtagtagccggggacgaggaagccagaggtggagttaggatcgccattgccaaaggtgagatctttccgcttcgccagcagatcgttcaggttgttgatcggactgtctttgttgacgatcaacacgctccagtaacccgggcttccatccgccgcgaccgtctgggcgaagacctggccattggcgcgatccaccgcttccatcgcgctcagattgccgtaccaggcgatatccactttattgaagcgcatcccctggataatgcccgcgtagtccggggcaaagaaggcgttgaccttcacgcccagcttcttctccatatcctgcaagaacggcgtccattgcggtttcaggttttgctgactttccgtactaataatgccgaaattcaacgccttttcctgctcttcggcgtgcgccgggcttaacagggtgctgaggctgaacatgctggtgaaggccaggctggcaattatcttagcgttcattcgttttcctcaatgatggggatgtcaggcagctttcgcgttctcttcgacgcggttaatgctgcggtagagatggtcaaaacgttcgttatcaaactgttggctgctgccgtcgtagaagacgtgcccctggcgcagggcgacgatgcgttcgcagtagcgcagggcgtaatccacctgatgcagcgtgacgaccacggtgatgccgtcgttctggttgatgtcgcgcagggtgtccatcacgatgcgcgcactttctgggtccaggctggcgatgggttcatcggccagaatcactttcgcctgctgcatcagcgcacgggcaatcgccacacgttgctgctggccgccggagagggtggaaacgcgctgatgggcaaaatgcaccatgccaacgcgggtcagcgcctgtaacgcgcgctgtttctgctcgccggtgaaccagctaaaacaggtgcgccagaacggcgtgctgccgagcgcgccaatcagcacgttctccagtacgctcaggcggttcaccaggttgaattgttggaatatgtagccggtatgggcgcggcttttgcggatatcgcgggccaggcggccttcgcgctggactgtgcggcccagcagctcgatatggctaccgacagatttatcgccggtaatcaaaccgcttaagtgacgtaaaagggtggattttccggaaccgctcggcccaagcagagccaccatttcaccgtgatgaatgttcagatcaaccgcatgcagcgcctgatgctgattgaaggttttggcgagcttctcgacacggataatcgtttgcatgatgcagcctccctaaaaaagtggctccatcgtggcggattattgtgacgatttggttaattaaaagtgactaacagatgaagagttaacgggaattcgatgacagtgcgggagggcgggcctcccggcgggttattgcgttggttgttgtttgacgacattaatcatccacggtacgccaaatttatcggtgactttgccaaagccatgcgcccagaaagtttcctgccaggccatttcgatttttccgttagcggcaagattgtcaaaccagcgttttccttcttcgacctgttggctatcgagcaccagcgtaaagccggagtagctggcttttccactcggcatggcatcgctcatcatgatgtcgcttccggcaatgcgcacattggcgtgggcgatggcggtatcgggaaattgcattccggaagggcagttctcggcgctgtcctgcgcactttttggcatttcgccgaagctgattttatagagcagttccgcgcccaacgtacgttgataataggcaatcgcgtcggaacagttaccggcaaaagagaggtagggacttaacggcatgatggtgacctcagttaagagaagccagttaagtgtagttcgaaatttatacagatgagaggcggcctgataagacgcgcgagcgtcgcatcaggcagtcggcactgttgccggatgcggcgtaaacgccttatccggcctacggagggtgcgggaatttgtaggcctgataagacgcgcaagcgtcgcatcaggcagtcggcaccattgccggatgcggcgtaaacgccttatccggcctacggagggtgcgggaatttgtaggcctgataagacgcgcaagcgtcgcatcaggcagtcggcaccgttgccggatgcggcgtaaacgccttatccggcctacggatggtgcgggaatttgtaggcctgataagacgcgcaagcgtcgcatcaggcagttggcactgttgccggatgcggcgtaaacgccttatccggcctacggagggtgcgggaatttgtaggcctgataagacgcgcaagcgtcgcatcaggcagtcggcaccgttgccggatgcggcgtaaacgccttatccggcctacggagggtgcgggaatttgtaggcctgataagacgcgcaagcgtcgcatcaggcatctggcaccgttgccggatgcggcgcgagcgccttatccggcttaccgatcacaatacaatcagttctttttcacaaactcagatttcagtttcatcggaccaaaaccgtcgattttgcaatcgatgttatggtcgccttcaaccaggcggatgtttttcactttggtgccaattttcagcatgctagagctacctttcaccttcagatctttaatgatggtaacgctgtcgccgtcagccagcagattgccgttagcatctttaacgatcagctcgtcgctttcctgtgcaggttctgcgtcgttccattcgtaggcacattccgggcagatgtacatgccgttatcttcgtaggtgtattcggagttgcattttgggcagtgtggtaaactcatgtggatttcctcaaaagtcagcagggcaaaagcgccaaaaaacggcagattgccgaaaaaggccgcaattatacacaaaatccctgagtttgtcgggggtactgctgattttagacgacgatcgttttcatttgaaaggaaacgcaaaaagaaaataatctttttgcctctatttattatttaagataatgttaatgctctacttgttctttttttaattcacatgatatttttatctttctgacgttttaaacgtatcagaagacgttatttattctgataaaaaacaacacactaaatataaaattatttcttgcagtaattataaaagccgaaaacagaactcaaaaacaatctggctaaataaaataacaaaatttgctttaaggaagaattttctatgtacacacagaccctgtatgagttaagtcaggaggctgaacgcctgttacagctttctcgccaacagttgcagttactggaaaaaatgcctctctctgtacccggagacgacgcgccacaactggctttaccctggagtcagcctaatatcgccgaacgtcacgcgatgctgaataatgagttgcgtaaaatttcccgactggaaatggtgcttgcaattgtcggtaccatgaaagcagggaaaagtaccaccattaatgccattgttggtacggaggttctgcctaatcgtaatcgcccaatgactgcgctgccgacgcttattcgccatacgcccgggcaaaaggaaccggtactgcattttagtcatgtcgcgccaatcgattgtttaattcaacaattacaacagcgcctgcgtgattgcgatattaagcatctgaccgatgtgctggaaatagataaagatatgcgtgcgcttatgcagcggatcgaaaatggcgtcgctttcgaaaaatattatctgggtgcccagcctatttttcattgtctgaaaagtttgaatgatttagtgcgactggcgaaggcgctggacgtcgattttcctttttctgcttacgccgccattgagcatattcccgtgattgaagtggagtttgtccatctagcggggctggagagttatcccggtcagttgacgttactggatacccccgggccaaatgaagccgggcaaccgcatctgcaaaaaatgcttaaccagcagctggcacgcgccagcgcggtactggcggtgctggattatacgcaactgaaaagcatctccgatgaagaggtccgtgaggcgattttggcggtggggcaaagcgtgccgctgtacgtgctggtcaataagttcgatcaacaggatcgtaacagtgacgacgccgaccaggtgcgggcactgatttccgggacgctgatgaaaggctgtattacgccacagcagatatttccggtgagcagcatgtggggctacctggcgaatcgggcgcgctatgagttagccaacaacggtaagttaccaccgccagagcaacaacgctgggtggaagattttgcccatgccgcgcttggcaggcgctggcgtcatgccgatctggcggacctcgaacatattcgtcatgctgccgatcagttgtgggaagatagcctgttcgcccagccaattcaggcgttgcttcatgccgcttacgctaacgccagcttgtatgctctgcgatctgccgcgcataaactgttgaattacgcgcagcaggcgcgggaatacctggattttcgtgcgcacgggttaaacgtcgcttgtgaacaattgcggcaaaatatccaccagatcgaagaaagtttgcagctattgcaactcaatcaggcgcaggtgagcggcgagattaaacatgaaatcgagctggccctgacctccgccaaccactttctgcgtcaacagcaagatgcgctgaaggtgcagttagccgccttgtttcaggatgatagcgagccgttaagcgagattcgtacccgctgtgagacactgttacagacggcgcagaacaccatcagtcgcgactttacgctgcgttttgccgagcttgaatccaccctttgccgggtgttaaccgatgttattcgccccattgagcaacaagtcaaaatggaattgagcgagagtgggtttcgtcctgggtttcattttcctgtttttcacggcgtagttccccacttcaacactcgccagctgttcagtgaagtcattagccgccaggaagcaacggacgagcagagcacgcgtttaggcgttgtgcgtgagacttttagccgctggttgaatcagcccgactggggacggggaaatgagaaaagtccgacagaaacggttgattacagtgtgttgcaacgagcattaagcgcagaagtcgatctctattgccaacaaatggctaaagttctggcagagcaggtcgatgaatctgttacggcaggcatgaatacttttttcgctgagttcgctagttgtttgacggaattacagacgcgtttacgcgaaagtctggctctgcgtcaacaaaatgaaagcgtggtcaggctgatgcagcagcaattgcagcagactgtgatgactcacggctggatttacaccgacgcccagctgttacgcgatgatattcaaacacttttcacggcagaacgatattgaccaagacgttacttgacggccccggtcgcgtgctggagagcgtttatccccgctttttagtggatctggcgcagggtgatgatgcccgccttccacaagcccatcagcagcagtttcgtgaacgactgatgcaggaacttcttagccgtgtgcagcttcagacatggacgaacggcggcatgttaaatgcgccgcttagcctgcgtctgacattggtggaaaaactggcgagcatgctggatcccggtcatctggcactgacgcagatcgcgcagcatctggcgctgctgcaaaaaatggatcaccgccagcactctgctttcccggagctcccccagcaaattgccgccttgtatgagtggtttagtgcccgttgtcgctggaaggaaaaggcgttaacgcaacgaggcctactggtgcaggcaggtgatcagagcgagcaaatttttacccgctggcgtgctggggcgtataacgcctggagcttgcctgggcgctgttttatcgttctggaggagttgcgctggggggcatttggcgatgcctgccgtctgggaagcccgcaagcggtggcgttgttgctgggtgatttgctcgagaaagcgacacaacatctggcagagagtatcaatgcggcaccgaccacgcgtcactattaccatcagtggtttgcctctagcaccgttccgacgggcggggagcatgctgattttttaagttggctgggaaagtggaccacggcagataaacaacccgtttgctggagtgtgacccaacgctggcaaactgtcgcgctggggatgccacgactctgtagtgcgcagcgtctggcgggggcaatgctcgaggaaatcttctctgtaaatttggcgtaaataatcagttacatcaatgagtcctaaacgaaatccatgtgtgaagttgatcacaaatttaaacactggtagggtaaaaaggtcattaactgcccaattcaggcgtcaactggtttgattgtacattccttaaccggagggtgtaagcaaacccgctacgcttgttacagagattgcatcctgcaattcccgctccccttttgcggccgtcgcgctgatttttctggcgtttgcggaaatgggccaactctgcgaggaaagctatgctgaaaaggaaaaaagtaaaaccgattacccttcgtgatgtcaccattattgatgacggtaaactgcgtaaagccattaccgcagcaagtctgggtaatgcaatggaatggttcgattttggtgtttatggttttgttgcttacgcattaggtaaagtttttttcccgggggctgaccccagcgtgcagatggttgctgcacttgccactttctccgttccctttctgattcgaccgcttggcggactcttctttggtatgttgggcgataaatatggtcgccagaagatcctcgctatcactattgtgattatgagcatcagtacgttctgtattggcttaataccgtcctacgacacgattggtatttgggcaccgattctgctgttgatctgtaagatggcacaaggtttcagcgtcggcggtgaatataccggggcgagcatatttgttgcggaatactcccctgaccgtaaacgtggctttatgggcagctggctggacttcggttctattgccgggtttgtgctgggtgcgggcgtggtggtgttaattagcaccattgtcggcgaagcgaacttcctcgattggggctggcgtattccgttctttatcgctctgccgttagggattatcgggctttacctgcgccatgcgctggaagagactccggcgttccagcagcatgtcgataaactggaacagggcgaccgtgaaggtttgcaggatggcccgaaagtcagctttaaagagattgccactaaatactggcgcagcctgttgacatgtattggtctggtaattgccaccaacgtgacttactacatgttgctgacctatatgccgagttatttgagccataacctgcattactccgaagaccacggggtgctgattattatcgccattatgatcggtatgctgtttgtccagccggtgatgggcttgctgagtgaccgttttggccgtcgtccgtttgtgctacttggtagtgttgccctgtttgtgttggcgatcccggcgtttattctgattaacagtaacgtcatcggcctgatttttgccgggttactgatgctggcggtgatccttaactgctttacgggcgttatggcttctaccttgccagcgatgttcccgacgcatatccgttacagcgcgctggcggcggcatttaatattagcgtgctggttgccggtctgacgccaacgctggcggcctggctggtcgaaagcagccagaatctgatgatgcctgcctattacctgatggtagtggcggtggttggtttaatcaccggcgtaaccatgaaagagacggcaaatcgtccgttgaaaggtgcgacaccggcggcgagtgatatacaggaagcgaaggaaattctcgtcgagcattacgataatatcgagcagaaaatcgatgatattgaccacgagattgccgatttgcaggcgaaacgtacccgcctggtgcagcaacatccgcgaattgatgaataagctgaaacggatggcctgatgtgacgctgtcttatcaggccaattgaactcttaaggttcacttaatctctgacgcgcatactctcctccaggttaacggaggagagtgcaatgaaaaaccgtgtttatgaaagtttaactaccgtgttcagcgtgctggtggtcagcagctttctttatatctggtttgccacgtactgatctttcttcagccgtacccaggcccgcgtgccggaagtctcttgccggttttgcaggaaaaactgcccgtgatgcaactgtgtaatgcggctgacaatacttaaccccagaccaatcccgccataacggctgtccatacgtacaaacgctttactcaactccccgcatttactctcatcaatacctggtccttcatcttcaactgccatgaccgctccgtcatcttcttgcagcttaatcataatgttgctgccttgcgggctgtaacgatgggcgttttctaccaggtttcgcaataacatccgcagcagggttgcatcaccctgaacggtgatgtcggcggcgctctctggcaatagcagggtttgctgtcgctggtcgagcatggtactgagttcgtcatagctggggagaatgacatcttccagcagttttacatgttgataattaccggaagaaaaactctgtccggcacgcgccagttgcagcagctgggagacgctctccatcatctgatcaagccgtgccactaacggtgctacatcaatgtgatgcgttttcgccagcagttccagatgcaaacgcacccccgccagtggcgttcgcagttcgtgcgcgacgtcagcggtaaacaacctttcgttatccagcgtgctggtcaggcgactgaccagatcgtttaacgcgctaaccaccgcttcgatttcgagggtggcgctgtgaatggcaatgggcgttaagttgtcggcggtgcgcgcttccagctctttttgcagctccgccagcgggcgggtgatgcggcgtaccgcctgatagcagataaatagcgtcaggctgaccataaagacgccggggacaatcaggctggcgaccgcctcgcggatctcacgcatgatgtggcgatcgttgttgcgattgtcgcgtagcgcctgctcaaacagctgaatctgctcggtactttcatgccatagccagaagacgctgatcagctcaaacaccaacaaaatggccccgatggtcaatatcagccgttggcgcaggcttattggtcggcgcagaaaatgcatcagattcaattagttttcctcattcgcgaccagcatatagccaaagccgcgcacggtgcggatacgggctttgcccactttgtcgcgcagattgtggatatgcacttccagggtgttggtgctgggttcattgtcccagttatagatgtcgttgtagagaatttcccgatgcaccggactgcctgctttgagcattaaccgactcagcagagcatattctttgggcgtcagaatcaactcttcaccgcccatccatacctgacggcgacccatgttcagcgtcagattgccaacaatcagctcactttcgccctgattattatggcgtcgtagcagggcgcggatacgggcatgtaactcttccagcgcaaaaggcttcaccagatagtcgtcggcaccgacatccagcccggcgattttgtcggtcagcgtatcgcgagcggtgaggatcagtaccggcagggtatattttttctgccggatacgggcgagaaaatgcagtccatcttcgtcgggtaaccctaaatccagtaccaccaggctgtaatgacctgcctcaaggctttgttccgccatccgcgcggttgtcacgctatcgcacgcgtagccttcggtttgcgccgccagaatcagtccctgcaataacagcgtatcgtcttcaacaatcagaattttcattcactcactctcctgcaagtttgcagaatatcatccgcagcctggtaatacttcgtctcaacgccagttaatcccaatagcgtggagaataaattgtcttgactatagtgttgcgtttgcgcctgtttttgcaggcagttctggtcaacctgataccgtttttgataatcctcgctcagccacagcagcatcggcacctgtttttggctatccggggcgatggcataaggcagaccgtgcagatagatgccattttcacctaagctttcaccgtggtcagaaagataaaccaggctggtggtaaatttatcctgatgttctttcagcagattaatcgctttatcaacaatatagtcgacgtaaaccagcgtgttgtcgtaagtgttcaccagttgctctttggtacaggtctggatctcattggtgtcgcaggttggggtaaatttcctgaactgaggcggatagcggttgtaataggtcggaccgtggctgccgatggtgtgtaagacaatcacgccatcaccttgcaggttattgatgtactcttcaagcccgtggaacagcacttcgtcatagcattcgccgttgatgcactgatcaggtagattcagcgcggtgacgttctggtgaggcacgcggtcgcaggcacctttacagccgccatcgttgtcattccacagcacgttgatgcccgctcgctgaatgatatccagcacgccttcctggtgctgtgccagctcttctttgtagtgctcacgcggcatatcgctgaacatgcacggtacactaactgccgttgccgtgccgcaagatgcggtattagggaaatagaccacgttatctttcgccagccgcgggttagtttcacgcgggtagccgttgagggagaagttctccgcccggctggtttcgccgacaatcaggatggtcaaatttttacgtttttcgttctgcattaacgggttgcggtgcgcgtcttcaccaattcgcaccagcggcagatttgccagtcgctgatgggagtaccaactccagctggcaacaatgctgttagaggggcttaaggatttcaccagctctttgttattgcggaacaagctggcgtagtctttataaaacagtgcggcgaccagcaaaatcagtagtacagaaaccagaatattggctccacggaaaagaacactgcgcagacggctggtggcaggtttgatttttatccagcaggcaatcagcgcagcaagcacgccgctgaatcccagcgttaataacatttgcggtgtcatcagcgcataactttctgccggagtggtatcaataatattggcaatcatgctgcggtcgatgacgatgccgtaagtcattatgaaatattgtgcagccgcgccaaccagaataaacaggcaggccagtggtcgattaagccataagaaagagcttagtgtcaggacaatattaatcacgctgaaagcgacgaccggcatgctcaagaaaaccagtacgttatgcaggctatccagcggcagcgcctgcaacacctgtttaaaaaaggcaatattcaggcagatagagatataaaaagcggccaacaatagccaggcgagtaaattcaaagagggtctttttagtaggcgcttcaacatcacggtgtttccatcgaacaaagtgcgcatatgctcgcaaagcaaaattaagccaaccttaagttcttaaggttggcttttatgtttgctggattaaggggaattaatctttgcttattggtgcatctaagggatacgggtttttatgtagccggttgtaattcagcgcatacatggcggtgatgaccatcagggtgacaaaactccacataacctctttcgctccggaccccaccacggcccagatgcagtagaggaaggcaatggtagtaactgccagatatgccgggcgtgctttaccaaagtgaccgtgtccgagcagcagtaacgccgcacaggtgtaaagatatggcaccagtgtaaagatgacgctgacggaagaaaccagaccgaactctttggtcgcgtttggactaatgctgctgagctggaagatggtcatcaaaataccgacgataatcagccccgccactggcgtacccgctttatttacacgggcaaaaatcggtgggaacagtccgtcatcggcagcggctttcgccgtttgacccgccagcaacgtccagccgcccagactacctaagcaacccgcagctgcgcagaaggaaacaatggccccggcggtgtcacccaacgccatccgtgcggcatcaccgaatgggctagcagaaacgcgcagtgcggcattagggatcatccccataatcgcggtggtagaaagtacatagcaaacggcggcaatcaataccccaccaatggtggcgatagggacattgcgtttcgggtttttcaccacacctgcggcaacggaggcactttccacaccgatgaagctccacagcgtaacgttaagggtactttgaattgcaccgaaggtgcccaggccgctgacgttccatgccgccatataggtttcaccacggaaccagaaccagccaaatacggcaatcccgacgatggggatcagcgccagcacggtggcaactgcctgcacacgggtgatcattttcggaccgacaatgttcagcaggacgaagatccacagcaccacgacgcaggtgatggttaataccaatggatctttcagaatcgggaagaagtaacttaaatatcctacgccaatgaccaccatggcgatattgccgatccagcaggccagccagtagaggacgttggtttgataaccgagaaacgggccaaagcagcggcgggcgtaagcgtaagaaccaccaggacttgggtcgaggaagctcattttggcgtataccatgctgagccccagtgcaccgataatcgtcaccaaccatccataaatggcaatcccgccagtagaggccaggtttgcaggtaacagaaaaacaccactccccataatattcccgctcaccatcagggtgacggggattaagcccactttgtgagcatcagcatcgctagacataattaaactcctgcgaaggcgagcttcgtgacaataaattacgtcatatcatacgcctgcattcgatagttgaattattatcgaccgggttatcgctgatgccgttattaatatagctcttcgttaaggttaaaaatcaggcgacagtgcgttctctgtgctgactaacataatgcagcggcgtcataccgtagaagtctttaaagacagaaataaagtagctcgtactgttgtagccgcaggactgacttacctgagagatatttttaccgtccatcattaattcatttacggcataacgcatgcggcaggtggtgattatttggctataactggtgttttcgcttttcaactttttctttaacagacttgggctaagacataaacaactggctaccatactaagattccagtctttgtgaatatcgctttcaataatttgataaacgctgtcacttacacaattacgtaacatatacatcattaaactaacgaattttttactgtcgagaaaacgggatagcaccgtgaataataatgcgcgtgttcgttccttttcactctcagtttctgcgggcatcatgctgtgttgcgcggcaacgcgaaagacgtctggcgtcaggcatggcagggtgagtatgggcgtagcgctacgttgccatactggtatttggctgagatctttattcagaaaccggaggtaatctttgatgatgtcgtgactaatatgagcaaccaaagtgttgttaagagaggagacgtcgataatattattttcacaatttaataacgccatatggttagctttaaggctaataggttctttcccattcacccttatccagacatctttttcagtcaataaaacaatacaaggttggtcgctgcaaatcctcatacatgtactcctgagtgcgaataaaagaccagttctcgctaaagcaaagcgataccgggaaatggttatataattgtatgatgaatataaacatgcataaaaataacgagttttactaatagtacaaatttttatagtaatttctcatgtacatatttttttacaggataaataacaggcaaaaaaaagcgcggggtggggccgcgcaaaaagtatgacatttttgtttgcagcaatttttatgaaaacgttgccatactcaaaaggcctaaggccaggcggcgtaatgttatttaaacaattacgccttcagcggaatagtggttacgctttcacgcacataacgtggtaaataccgtcaataatttcagtcccttcagtttcgtgttcaaatccagggaaatggtggtcccaggattgcaggctgcgtaaataacttacttgcggactgtttttatcgccgaagttttcaccagacagcagcatcgggattcctggcggatacgggataacactgtttgccgcgatgcgtcctggcagattttcaatggataccagttcgacattgttgtcgacaatcgcgttgtacgcttcacgcggggtgacttccgccaccggcaggccggaataggcttcgttcaaccgtgcgccagggttgttttctttcagccaggcaaacatggtgtcacccagatcgtgaatccccatgttcgcgtaagtgtcaggatattgttcaacaagttccggcatcacctgcgccagcggtgtgttggcgtcatagtggcgtttgaaggagcaaagggtgttaaccagagttccccatttcccacgggttacgcccatagagaacaggaacataatttggaagtcagtggtgcgggtaggtacaatgccgtggcgaccaagccaggcagtgaccagcgccgccggaacaccggtttcttccagttcaccatcttcacccattcccggagcaaggatgctgactttaatcgggtcgagcatactccagttatccggaatatctttgaagccgtgccagctttcgcccggatgcattacccagcagtcctgaacggtggtcagcagtttggttggtgcgtcagcaaagtcataggttttgccggtttgtgggtcggtgacgacttctttgttccacggtttgaagaaccagctaccgtcagcggtgaactctttatatagccgcgccatcgcctgacggaaatcaaccgcttcgtcaatcacttcctgtgtcagactcaggccgctgttgccgtccatcatgctcaccgccacgtcgttggatgcgcagatggcatacagcggggaggtggtggcatgcatcatgtaggcctggttgaagcgggagaagttaatcgccccacgaccttcacgtacatgaatataagaagcctgactcagcgcattcagcagtttgtgggtggagtgggtggcgaaaacggtaggaccgttgtgatcgccaggttcgccgcgcatggcatagtgatcggcatagatcgggttgaaacgtgcatagccgtaccaggcttcgtcaaagtgcagacgatcggaggttttttccagcagatcctgcgcttctttagcgttataacacacgccgtcataggtgcagttggtcaccacgcagtaagacggtttttgcccggctttgtctttggtcagcgggctttcactgattttcttctgcaaggtttcaggttgcatttcctgcggatagattggcccgataatgccgtagcggttgcggcttggcaccatatagaccggtttcgcgcctgtcagcatcaaaccttgttcgatggatttatggcagttacggtcaacgaccacgacatcgttatcggtcatgcaagcctgcatgatggtgcggttagagccggaagtaccgacgactacgctccaggagcgatcggcaccaaatacgcgtgcggcatatttttcgctttcgccaaatgcgccagtatggtcaagcaaagaaccgagggaagttcgttcgatgcccatgtcggtgcggaacagattttcaccatagtagtcatggtagaaacgtccggcgggtgttttggtaaaaccaacgccgccctggtggcctggcgctgcccaggaatattcatggatgtcactatatttcatcagcgcgctgaacagtggcggcaacagctgctggcggtagcgggtcatcgcggcaacggcgcgtccggcgataaagtcggcggtatcttccagaatccaggcgaattcatcgacaagctccagcaggtcgcgatccattgcggcgagggctttttcccgatcgcccaacaggaagaccggcacgttttgttggcgctcatgaagcttaccgatcaattgtctgacgttttgatgttcgtccggatgttccatttgatagctgaacatcaggcagtcaatggcttcgttactagagagaatggcaaaaccatcatcaaaggaggtggatttaatcacggtaacattttgctggcttaaagcatctgccagacgctcaacggcgttaccgacccaggtgtcttgatggagaaactcgctttcaacaattaatactttcatcattgcttacccggttatgaaggaatcttcgttgcgggcaagtatcttccggccttttcgggctgtaaagcgcgtgaaaaacaaacatttttgaaatatttagttttataaacaatacgttatgtgattattttaaattattttcactgcttattatcgacggctaaactatttttttggctgatactgatatcgtctttagccgggaaacgtctggcggcgctgttggctaagtttgcggtattgttgcgggctcatgccgacatatttgccgaacgtgctgtaaaaacgactactactacgaaagcctgccgtcagggcaatatcgagaatacttttatcggtatcgctcagtaacgcgcgaacgtggttgatgcgcatcgcggtaatgtactgtttcatcgtcaattgcatgacccgctggaatatccccattgcatagttggcgttaagtttgacgtgctcagccacatcgttgatggtcagcgcctgatcatagttttcggcaataaagcccagcatctggctaacataaaattgcgcatggcggctgacgctgtttttgtgtgtgcggctggttttattgaccagaatcggttcccagccagagaggctaaatcgcttgagcatcaggccaatttcatcaatggcgagctggcgaatttgctcgttcggactgtttaattcctgctgccagcggcgcacttcaaacgggctaagttgctgtgtggccagacttttgatcaccatgccgtgagtgacgtggttaatcaggtctttatccagcggccaggagagaaacagatgcatcggcagattaaaaatcgccatgctctgacaggttccggtatctgttagttggtgcggtgtacaggcccagaacagcgtgatatgaccctgattgatattcactttttcattgttgatcaggtattccacatcgccatcgaaaggcacattcacttcgacctgaccatgccagtggctggtgggcatgatatgcggtgcgcgaaactcaatctccatccgctggtattcgctatacaggctcagcgggctgcgggtctgtttttcgtcgctgctgcacataaacgtatctgtattcatggatggctctctttcctggaatatcagaattatggcaggagtgagggaggatgactgcgagtgggagcacggttttcaccctcttcccagaggggcgaggggactctccgagtatcatgaggccgaaaactctgcttttcaggtaatttattcccataaactcagatttactgctgcttcacgcaggatctgagtttatgggaatgctcaacctggaagccggaggttttctgcagattcgcctgccatgatgaagttattcaagcaagccaggagatctgcatgatgtctgcacccaaaattacatttatcggcgctggtagcacgattttcgttaaaaatattcttggtgatgtgttccatcgcgaggcgctgaaaacggcgcatattgccctgatggacattgaccccacccgcctggaagagagccatattgtggtgcgtaagctgatggatagtgcaggggccagcggcaaaatcacctgccacacccaacagaaagaagccttagaggatgccgattttgtcgtggtggcatttcagattggcggttatgaaccttgcacggtgactgatttcgaggtctgtaagcggcatggtctggaacaaaccattgccgatacgttggggccgggcggtattatgcgcgcgctacgtaccattccgcatctgtggcaaatttgcgaggacatgacggaagtctgccccgatgccaccatgctcaactatgttaacccaatggcgatgaatacctgggcgatgtatgcccgctatccgcatatcaaacaggtcgggctgtgccatagcgtgcagggaacggcggaagagttggcgcgtgacctcaatatcgacccagctacgctgcgttaccgttgcgcaggtatcaaccatatggcgttttacctggagctggagcgcaaaaccgccgacggcagttatgtgaatctctacccggaactgctggcggcttatgaagcagggcaggcaccgaagccgaatattcatggcaatactcgctgccagaatattgtgcgctacgaaatgttcaaaaagctgggctatttcgtcacggaaagcagtgaacattttgctgagtacacaccgtggtttattaagccaggtcgtgaggatttgattgagcgttataaagtaccgctggatgagtacccgaaacgctgcgtcgagcagctggcgaactggcataaagagctggaggagtataaaaaagcctcccggattgatattaaaccgagtcgggaatatgccagcacaatcatgaacgctatctggactggcgagccgagtgtgatttacggcaacgtccgtaacgatggtttgattgataacctgccacaaggatgttgcgtggaagtagcctgtctggttgatgctaatggcattcagccgaccaaagtcggtacgctacctagccatctggccgccctgatgcaaaccaacatcaacgtacagacgctgctgaccgaagctattcttacggaaaatcgcgaccgtgtttaccacgccgcgatgatggacccgcatactgccgccgtgctgggcattgacgaaatatatgctcttgttgacgacctgattgccgcccacggcgactggctgccaggctggttgcaccgttaaaacgcgactaaacgctactgcgccgggggatttattccggcgcacacctctgacgataccaataacagaaggcgggcgttggtaacagcgacccgataccctatgagcatttcaatgactacaaaactcagttatggatttggagcgttcgggaaggattttgcgatcggcattgtgtatatgtacctcatgtattactacaccgatgtcgtcgggctgtctgtgggtttggtcggtactttgtttctggtggcgaggatctgggatgctattaacgatccgattatgggatggattgtaaatgctacgcgaagccgatggggtaagttcaaaccctggatcctgatcggtacgttggcaaactctgtaatcttatttctcctctttagtgcgcatctgtttgaaggtactactcagattgtctttgtttgcgtgacctacatcctctggggcatgacttacaccattatggatattcccttctggagcctggttccaaccatcacgctcgataaacgtgagcgcgaacaactggttccttatccgcgtttttttgccagtctggcaggctttgttacggcaggtgtgacgctaccatttgttaattatgtcggcggtggcgatcggggatttggctttcagatgttcactctggtactgatcgccttttttattgttagtaccatcatcactctgcgcaatgtgcatgaagtctttagcagtgacaatcaaccgtctgctgaaggaagccatctgacacttaaagccatcgttgcgctaatttataaaaacgatcagcttagttgcctcttgggtatggctcttgcttataatgtagccagcaacattattaccggctttgctatctattatttcagttatgttatcggtgatgcggatttgttcccctattatctgagctatgcgggagctgctaacctggtgacgttagtattcttcccacgcttagttaaaagtttatcccgacgcattttatgggccggagcatctattcttccggtgttaagctgtggtgttctcctgttaatggcattaatgagctatcacaacgtcgtcctcattgtgattgcgggtattttgctgaatgtgggaacggcgcttttctgggtattacaggtcatcatggtggcagatatcgttgattacggtgaatataaactgcacgtacgctgtgaaagtatcgcttactccgtgcagactatggtggtgaagggcggtagtgcctttgcggcttttttcattgcggttgtgttagggatgattggctatgtaccgaatgttgaacagtctacgcaagccctattaggtatgcagtttattatgattgctctaccaactctgtttttcatggtaacgctgattctctacttccgtttctatcgcctcaatggtgacacgctgcgcaggatccagatccatctgctggataaatatcgcaaagtaccgcccgagcctgttcatgctgatattccggtcggtgcagtgagtgatgtgaaagcctgacgtggacaatagctaacgaaaatggcctgatgcgatatgtttatcaggccacgtcttaatgtaatgctttggatttgcaaattttgtagaccggataaggaattcacgccgcatccggcatcaacaaagcgcaagttgttatccggttatcaagccaaagcgccgtagctggcggcaatgaaagcgagcgaggaatatcaccgtcgttaatgcgccaagcagcgcgcagaacatatcggattgcgtgtcccactggtcgccctgggtgccgagaaaatcatccgctccctgacccattgccagcgctgcccaccactcgattaattcatacatcgcgcttatcgccagcgccacgcagcagaccaggaacgccaccattttacgtccgcgcacgtacatcccgcgaacgagaatttctcgtgccaccagtgcaggcaccagcccctggaaaaagtgccccagcttgtcatacggattacgactcaaccccagccattcctgcacctcaaaaccaacggggactttcgcgtaggtgtattgtccgccgaccatcaggatgatggcgtgaaggaaaatgagcgtatagagcagcggcgttaacggataacgtctggcggtggcaagcagtagctgcacgacaataatcaccggtgtcacttccatcagccaggtgagtttgtcatgggcgctaatgccggtataaatcaggattaacgttagcgtcagtgcgctggtgttaagaattaacggcttgagtgtgcgggtcatggtgagttcgcaaatcagggaaaatactgactattcaccagcaagcgtgaaattacaatcgcaaaagaggtggccagggggatcacctggcagcatgctgccaggcgctgggccgaagaggttacttagtgcagttcgcgcactgtttgttgacgatttgctggaagaagtcgttacctttgtcatcgaccaggataaacgccgggaaatcttctacttcgattttccagatagcttccatacccagctccggataagcgacgcactccagatgcttgatgctctgctgcgccagtaccgccgccggaccgccgatgctaccgaggtagaagccgccgtgtttatgacacgcgtcggtaacctgctgactgcggttacctttcgccagcatgatcatgctgccgccgtgggattgcagcagatccacgtaggagtccatacggcctgcggtggttgggccaagactaccacttggataaccggcaggggttttcgccggacccgcgtagtagatcgggtgatctttgatgtactgcggaagttctttaccggcgtcaatcagctctttcagcttggcgtgtgcaatatctcggcccacgataatggtgccggtgaggctcaaacgagtggataccgggtattggctaagctgggcgaggatctctttcatcgggcggttaaggtcaactttcaccgcttcgccttcaccggcctggcgcagttcttgtggaatgtactggcctgggttgtgttccagtttttcgatccagataccttcgcggttgattttcgctttaatgttacggtcagcggagcaggagacgcccatgccgaccgggcaggatgcgccgtgacgtggcagacggataacgcgaatgtcgtgcgcgaagtatttaccgccaaactgcgcgccaagaccgagtttctgggcctcttccagcagttcctgttccagctggacatcgcggaacgcctgaccatgttcgttcccttccgtcggcagttcatcgtaatagtgagcgcttgctaacttgacggttttcaggttggtttccgcagacgtaccgccaatcacaaacgcgatatggtacggcgggcaggctgcagtaccgagggtacgcattttctcgacgaggaagtttttcagtttgccgggagtcagcagggctttggtttcctggtagagatacgttttgttggcagagccgccgcctttcgcaacgcaaaggaatttgtactcatcgccatctaccgcgtacaggtcgatttgcgcaggcaggttagtgccggtgttgacctctttgtacatgtccagcgccgcattctgactatagcgcaggttatcttcgatataggtgttatagacgcctttgctcagcgtttcttcatcaccgccgccggtccacacgcgctggccttttttaccgacgatgatcgcggtgccggtatcctggcaggtcggcagcacgcctttggcggcgatttcggagtttcttaagaattgcagcgccacgtacttgtcgttttcgctggcttctggatcgtgaagaatagccgcaacctgtttctggtgtgccgggcggagcataaaagaagcgtcgtgaaaggcttgctgcgccagcagggtcagggcttctggttccactttcaggatggtttcgccgtcgaagtcggcaacgctaacgtaatcggaagtgagtagatagtattcggtattgtctttccccatcgggaaaggtgcctggtagataaagggtttgttactcatagcttccagcctgtaactctgtatttgttattcgaaaatggcgtgccgcgtagtcacgggcggcacgcaaagtgcatttataagaacccgtacatcgcggcgaagatccagccgaagacgcagcttacgctcacaccaatcaaccccggcagaataaagctgtggttgatgacgaagcgaccgatgtgggtggtgccggaacggtcaaactgaatcgctgccagatcgctcggataagtcggcaggatgtaataaccgtagcaagccggtgcactagccacgatgtatgccggatcaacgccgatcgccagcgcgaccggaacaatcgccgccagcgccgcagcctgagagtttacaaacttggaaaccagcagcagaacaatggcataggcccacggatactctttcaccatttcacccagtacgccctgaatttcagacatatgcgcaccgaacatggtttctgccatccatgcgataccgtacaccgccacgatggcgatcataccggaacggaagacttcgtttttactgatagacgcgggattggttttggtcaggataataatcagcgccccggtcagcagcataaacatctgaataaccagtaccatgctcagcggtttgccgccgaaggatggacgcaggtcgctatcagcaccaagaagggcgactacagcgattgccccgaggaaaatccacattgccagccagttgcttttcggcagttttttatccagcagcgtcgcggtatcaccgtaaacatactcacggttttccggtacggagatgaatttctggaactcttcgtctttatccagatctttaccgcggaaccagctgaagataccgatcgccaggataccgattaacgtgcttggaatggtgattgccagcagatcgaggaactcaagatggcgaccatcaaaggtgacattacccagcatcgcaaccagagacacgaccgcaacgctcaccggactggcgataatccccatctgtgcaccgatagaacttgccgccatcggacgttccggacggatgttgttcttaatggcgacgtcgtagatgatcggcagaatggtgtaaaccacatgacccgtaccgcaaagaatggtcagtgtacaggtcacaaacggcgcgacaatactgacatatttcgggttgcggcgcagcagcttctcggcaatttgcagcatgacatcaagaccgccgctagcttgcaaggtcgcgcttgccgccaccaccgcaatgataaccagcatgacatcaactggtggtttacctggctgaaggtggaagacgaagaccagaatgaccagaccgataccgcctaataaacccagcgcgataccaccctttctggcaccataaaacagacatatcagtattatgataagttggatagtaaataacatgtgtgaaccctcgcgataatcctatttaaatttttgctgaatagatcacagtcacgttctgttttgtatgaactgttttcagagcctgactaaatatccgtttggtcgttaccggctttagcaaatacctcacagtgaatattggctgattaaagcagcggcaaatttatgcactgtgataagcggctttttcagagagaaagactctctggcgatgggtttatagtttgtactgcgcagatgttaatgttttgtttgctgttatcttattgatatttatcggtctattttttgttctcagggcagatgtcattaggtttatagattaatctgatctacccatttgtgggtaaaaatacacataatgcgggtgacataatagttaattaacttttgttagcgttttgaaattaaaaacaccgttcacctgaagagatattaatttttagcgatgatggagggataattatatttgatctggcacaagttttactgatgaaggatgtaacttgtgccaggggtattttgcattacggtaataattattacttacagataaccagcgatccgttattggcaatattgtttcagtagactgtagtgttctgcctgaatacggtaacggtaaactggacgccccgtgacgccataatggatactggtgaacaagatgtggcagttgaccagccagatgaggtatttacggcaggaaacacggctaatgttaacctcgttggctagctcgtcggtactaaattcatagtcctgatgcgcgtcaatccactggcacagtgtgcgtaacgtctgcggcgttaagccttttggcaagcgacgaggatcctgttcgttggagctgctgccgtggattagctgatcaagctcggcctggtcataatactgatgtttttccagcgccattttcttttgccgccagccggtgagcgcctcttcaaagcgggaagcctggaagggtttgatcaggtaatccacgacaccgtaatgcaggctatctttaatggttgccgcatcggctgcggaggagatgacaatcacatcacttttgcaacgcgcgttatgcaggacaggcagtaaatcgagcccgttctctttttgcatatagatatcgagcaatatcaggtcgataggcgtatcgctattgaagataatctctttggctttctccagcgtgctggctgttccacagcattgaaagcctgggatttgtgctacgtatcggcgattcagctccgcgaccattgcgtcgtcatcgataattaatacattgatcatctgttgctcctctccccgtcccagggtatctggacaaaaaattgtgtgaaaatcccgggttcgctttccacggcgatgctgccgccgagattttctacctgttgtttgacaagtgctaaaccgacgcctcgctcgcttccttttgtgctgacacctttgtcaaaaatgtgatcgattttatcgggtgcgatccccggtccatcatcattaacttcacagtgcagccagccgtgacggtagtgcaatgttacgctaatttcgcctccgggttccggccctaatgcctccagcgcgttttctatcagatttcccaacgtggtaatcagcgtcgcgacctggtcctcactgccgctgtctggcagctggctttcactgtttaaaatcagcgtatggcctaaatcggtcgcgcggttaatcttgctgattaaaaaaccagcgataaccggagatttgatcttacccagcagagagccaatctcttcctgatagttattggctgttttgagaatgtaatcttccaactgcttataactcttcagatgcaataatccgagaatcacatgcaatttattcataaattcgtgggatcgttcacgaagtgcgtcagcatagttgaccagaccgtcgagtcgctgcatcagtttacgtacttcagttttgtccctgaaggtactaatggcaccgatgataacgccattactgcgcaccggaacggtgttgatcagtaatagccggtctttaatcgtaatctcttcgtcgcggcgcggggtaccgtcgcgtaacacttcgctgacatctaccacctgactccaactgtggcttagcgtgctcagtttctcatcgtcctggctcttacggtaattcagcaattcttgtgcggcatcgttgatcagcgtgacctcgccgcgatcgtccacggcaacgacgccttctttgatagactgcaacatggcctggcgttgctcaaacagcgtggagatttcgtagggttccaggccgaaaaggatttttttcagtaccttaaccagaatgcaggtgccaatcagtccgaccagcatgccaaataatacgctccagataatgctccagcgactgtcattgatctgttgggtcacacggcttaactcaaggccgatcgccaccacgccaatttgtttatgattttcatcgtagatgggggtaaatacgcgtaaagcctgcgccagaaaaccgcgattgatagcgacattttcttcgccattcagcgctttaaggatgtcatcacctttaaatggctgaccaatacgctgggcttcaggatggctgtagcgaagactttgcatatcggtaacgacaataaacagcagatcgttgcgtttgcgtacggcttccgcgatggcctggatgccactctcctgcggttttttctgcaagccctgacggatttccgggctgtcggcgagggtacgcgccactgccagtgccttgttggctagcccatctcgcgtcatatcactgatttggctgaagtaaatcagatgcaccaccaatagcacgctgaacagtaccgcactgaccattaagatcactgtggtactcaatttcatcggacgtttgcgtaacatgcggtagggcaaactatgtctcatcagcttccttgtgtgacaaatttcttaagcattatctctgatgaggcgggtaattcaaagggagtaagaatgattggctatataggggaagagactctggcaacggaaactgccagtgctgtatgaagattccggggctatgcttatagcgataatcatactgatgagagagggaaggtcatggatcaggcgctactggacgggggttatcgctgttataccggcgaaaagatcgatgtctatttcaacactgcgatatgtcagcattctggcaattgcgtacgtggcaacggcaagttatttaatctcaaacgaaagccgtggatcatgccggatgaagtcgacgtcgccactgtggttaaagtgattgatacgtgcccgagcggcgcgctgaaataccgtcataaataagcgagggtaaaatggaaatacgcgaaggccacaataaattttacattaatgacaaacaaggcaagcaaatcgctgaaattgtctttgtgccgaccggagagaatttagcgattatcgaacataccgatgtcgatgaaagcctgaaagggcaagggattggtaaacagctggttgcgaaagtcgtggaaaaaatgcgtcgggaaaaacgaaaaattatcccattatgcccatttgcgaaacatgaatttgataaaacgcgggagtatgatgatattcgcagttgatgggagagtacagagtcacgatatttttcattctctccgcgatgtgatgcaggagagcatctgaagggtagggggatgcacaaagaatgggcagagagcgcgtttttttgtcccaagtcatcccctttactgagcaaaaaaaagaatatctcctatatgagaatcatcaatcggggttaataagttttgcgtccccagagcgtttaatattgataggagtcatattatggaaggtaaaaacaagttcaatacttatgttgtttcttttgattatccaagttcttattccagtgtgttcttaagattaagaagtttgatgtatgatatgaatttctcctctatcgtggctgatgaatatgggataccacgacaattgaatgaaaactccttcgcaataacgacaagcttagccgcaagtgaaatcgaagatttaatcaggctcaaatgcttagacttaccggatattgattttgacctcaacattatgacagttgatgactatttccgtcagttttacaagtaaccaggaaggataagaagaacataaaaaatggcactattctctaaaatattaattttttatgtgattggtgtgaacatatcctttgtcattatctggtttatcagtcatgagaaaacacatattcgtttacttagtgcattcctggtcggaataacctggccaatgagtctgcctgtggcattacttttttctctcttttaagagctgtagttgagtggacccgctggttatcgtgaaacgaagcgtctctcctcaaaactggatttgcggaacgatgaacgaagcagtcgcctgactgcttcgttcattaaagtgaaatttatttctgtgggcgcatcgccgggaagagaataacgtcgcgaatagtatggctgttagtaaacagcataatcattcggtcgataccaatacccagaccagcggttggcggcagaccatattccagcgcagtcacgtaatcttcgtcatagaacatggcttcgtcgtcacctgcagctttagcattaacctgttcctggaaacgttcagcctgatcttctgcgtcgtttaattcgctaaaaccattaccgatttcacgaccaccgatgaagaattcaaaacggtcggtgatttccgggttaacatcattacggcgtgccagcggggacacttctgccggatattccgtaataaaggttggctgaatcagatgtgcttctgccacttcatcaaagatctctgtgacaatacgtcccaacccccagcttttctctaccgtaataccgatagattcagctaatgctttagcagcatcaaaattatccaggtcggccatatcggtttctggacgatattttttgattgcttcgcgcatggtgagtttttcaaacggtttgccgaaatcaaacacatgctcgccataagtgactttagtggtacccagaacctcttgtgccagggtgcggaacagactctctgtcagttcaatcaaatcgtggtaatccgcatacgccatgtagagttccatcattgtgaactcaggattatggcgaacagaaataccttcattacggaagttacggttgatttcgaatacccgttcaaaaccgcctacaaccagacgtttcagatacagctccggcgcgatacgcagatacatatctaaatccagagcattatgatgggtaataaacgggcgagcagatgccccacctggaattacctgcatcatcggggtttctacttccataaagccgcgcgcgaccatgaattgacggatagcggccagaattttactacggacaacaaacgtttgacgggatttatcgttagcgatgaggtccagataacgttgacgataacggacttcctgatcctgcagaccatggaatttatctggtaaaggacgtagtgctttagtcagcaggcgcagctcagtacagtgaatggaaagctcacccgtttgcgtcttaaacagcgtaccgcgggcaccgataatgtcacccagatcccattttttaaactgatcgttataaacaccttctggcaggctatctcttgcaacgtacagttgaatacggccaccgacatcctgcaacgttacaaaggaggctttccccatgatacgacgggtcatcattcggccagcaacgctgacttcaatgtttaaggattccagttcctggttatccttcgcatcaaactcttcgtgcaactggtcagaggtatggtcgcggcgaaaatcattgggaaacgccacaccttgctgacgtagtgccgccagtttttcgcggcgatttctcagttcatcgttaaaatcaatagcctcattggctccccgtgtttcttgttcagacattttggttcctctaaatccagctttcaatttagcgtagataaagagacagatcggtacactgtattatctgcctcgactattagtaactcagtttatcttatcgaaactaacgcttacctcaagttgatatcactaataaataaccatcaaaatggtttaaatgacttattaatctcgatttgttagtgttataaactaaaagttaatttattcataaccaattgtttttacgacagttaatcgttgctctcctgtatcatattcgtcggcgtgctaaacagaaaacgggtagcaaaggccaatacgacgatgatcgcgacacaagccaacgtccactctcccatctgagaaaagaatcgctggtaagctgcaattgccataccgctaatttggctctctgtcgtctgctgtgccacgacgcctgccagccagttggcgaccgcgcctgttgccagcatataaatcccggttaatacgccagacattttcagacgcgtgatttgcgcaatcgccaccgggtcaataaagagttcggcaaagcccattagcgccagcccggatatcatcacgcccatactcgcttgaccgtcagccgctgcatgtcgggcatcaaatgccaacaacataaagccacaagccatcagcagtaagccaaaggcaaacttcagccagacgcgcaatgtactgttgccgcggctttctgggctcgccagccaggccagtacaaccccagcgagcatcaccgcaattgcattcacgctctggaatagtgctgtaggtacttcaatattgaatgcctgacgattcacaaagcgatcgataaacaagctgatggtactgccgccctgttgtgccagtacccagaacaatgtcccgacaaacatcaacaatacaatttgccaaagagcacggcgatgttcggggaatttgatcatcatgcgggcaatgatttgtgcggcaatgaggcaaacgatcgccagcaaatatccggaccagtcgttctccagcagcagagtaaaaaatactggggctaaacagagcatcaccactaaccagctccatactggtaaggcaaatttgacactagtgagcgcttttttatccatactacgtgtggactggaaatgacgatgaccgcttaagaaaatcaacaaaccgataaacatgccgccacccgcaagggcaaagccaacatgccatccataccactgagcagccaggccgcaggcgattggggctgcgatagaaccgatattgcccgcagcatacagcaggctaaaaccgccatcacgtcgatgatcgttctcgtcgtagagctcgccaagcaaacagctgatgttacttttgaataaaccgtagccacaaataatgattgccagcgccagatacaggctaaaggtactatttgtatcaatacccagcaccacatggccaagggtcattaacagcgcgccggcaatcactgcagtgcggttgccgagcaggcggtcggcaagccagccgccgagaataggggtaacgtaaaccagagaagcatatgcgctgaacaggctgatggcatggttatcatcaaaaccaagctgatgggtgagatagagaatgagtaaggcacgcatgccgtaaaaactgaagtactcccagatttggatcgccacgatatagtatatcgcgcgcggctgactgggtgttttcatgtgttctccttatgagcaaaaaagggaagtggcaagccacttcccttgtacgagctaattattttttgctttcttctttcaataccttaacggtatagcggccatcagcctgacggtatgcaccgtgaatatcggtttcaaagcccggatagtgagcgccgatttcacacagcatctgcaggaactccagaaccggacggctttcttcggtgatcatttcacccggcattaccagaggaactcccggcgggtacggaaggatcatattggcgttaatacgacctaccatttcgtcgaggtaaacttcttcggtcataccgtgcagctctttctggaatgcagcatacggagtcattaccatcgtcggcagcacttcaaatgcgcgatacatcagatccggcagattgtggtgaacaatcagtttgtggatattctgagccagttcctgaatacgcatgttttcatagaattcaggatcttcacgatacagagacggcagcatgtttttcacacgcaggttcaggtcgaacgcacgtttaaagtcagtcagagcacgcagcaggctcagtgctttggtcttatcgataccgatgctgaacaggaacagcaggttatacggaccggttttctcaacaacgatgccatgttcgtcgaggtatttcgccacgatgctggccggaataccaaagtcgctcatggtgccgtctttttccatccccggagtcagcagggtgactttgatcgggtcaagatacatgtgctcgttatcgatgtttttgaagccgtgccaggtgctgtcagaacgcagcggccagcattcagtcgtatcgatatgatccggctgccatacatcaaagaaccagccatcagattccgttctcagacgtttgatctctttacggaatttgatcgcacgttcaatagaaccgttgatcagacgcttacctgcattgcctttcatcatcgccgcagcggtttcagtggacgccacgataccgtagtgcggagaagtggtggtgtgcatcatgtaggcttcgttaaaggtttcttcgtttacgtcacctttaacgtggatcatggaagcctgagagaacgccgccagcagtttgtgagtggactgggtttcgtaaatcactttcccttctacacggccaccgctcataccgcatttaccttcgtaaatcggactgaagttggtgtaaggcacccacgcggagtcaaagtggatggatttcacatccagtgttttcttgatgaagtcggtgttgtacagcagaccatcataggtagagttggtaattacagcatgtaccggccaggttgcgtttggtgtttctttcacgcgcttagcaatggtagcgtgctggaattcactctgtgggataccaccaagaataccgtaagcgttacgggtcgggcggaaatagattggcgtaacatcgctcatcatcatcaggtgggtcaggcttttgtggcagttacggtcaatcagaatggtgctgcctgctggagcagagtacataccaacaattttgttcgcagtggaagtaccgttggtcaccatgtagctgcggtctgcgttaaagacgcgagcgatatactgttctgcttctttgtgtggaccactgtgatccagcagagaacccagttcagatacactaatggaaatatcagatttcatggtattcggaccaaagaaatcatagaacaggctacctaccgggcttttctggaatgcagtaccgcccatgtgaccaggagtacagaaagtatatttaccttcacgaacatatttaaacagtgctttagtcagcggaggcagaatagtgttgatatattcgtcagtggtctgcttgatcttattagcaatatcttcagcagcacccagcgcatattcaaagaagctaatctgtaaacgcaggtcattcaggcttacatcgagagtggaatacgtattagcgaacgcgtacaacggcaggttctcgttcattttgctaatttcttcgcacagctcgagattatatttatcccagtcaaaaataacgccgcacagacgcgcattgttttcgatcagttttaataagtcgtcacggtcgttcgggtaaacaatctggaagttcagacgttcaagcgcgcgatgaagttcacggatgggttcttctttaaaataaacccccatgtgattcaatattgcaataacgttcatagtcatatctccaggtaaaaaaggcccctcccaacacatgggacaaaatgaaaggaggagcctcggaaaatacttttaattaatgtgcgttagacgcggtgtggttatccatactgtggctctggcgctcgtgcattttgcgagcgtagaacatcaggataatcaggctgacgatgaaggtacctgccagctcgaaggagcttgcgcccatcagcgcgatgaagcagaacacgcaacccagtacagagcagatcaggctgacaaagttgcggatgttaacgccttcaaaacgaatcaggtcaacgcaagagtagaaatacggcagcatagtcagcagtactgcgataccggtcagttcaccgaacaggtcagatgctttaccaccggcagagttcatcagagtgataaggatcatcagggcagtcattttcactgcagccagcagcagaccttttttcggaataccgttgctgtcgacttcaccataaactttcgggaagttaccgtcgttagcggcacgtacacctgcctggcctaccaacatcatccaggagcccagagaagtcaggcacgcaaaggcggtgaatgcagaaaccagcggcgcagcccagttaccgaggatagtactagcactgattgcaaacggagcaccggaagccgccattacagaagacggatacataccggaaagcacctgagtcgcagcgatgtaaacaatacctgctaaaccagtacccagcatggttgccagcggaacggtacgtttcgggtttttaaccataccagtacttacagctgcggattcaacacccacgaaggcccacaggcagagcagaatacttttaatgatcgcatgaccatcagtggtatccgcagtattccagttagctgcataagttgccgcatcaaaccaatgccagccaacaatagcagtcatcaccacaggaataagaaccagcaccagaccaatagtggttaaacggcttacccaagtaccgccgagcatatttacaaaggtaaatacccagacgatagcaatacaggcgatacccgccggaacaggatcatttaatactgggaagaaggtggaaagataagatacagcggtaataccaatcgccaggttaccaatccagttagcatggtaataaagaacacctgtctgaaaaccaaatgcaggggaaatttctccggcataagcaattgggccaccttgttgcgggttttttgttgccagtcgggcatatacatacgccaggctcattgcaccaataatagagataatccaaccccagatagcaataccaccgatacttgctaggttcgcaggtaataatgcaataccgctccccatcatattaccggcaacaacaccggtacaggcaaatagcccgatcttcttggcagaactcatgctcttctcctaatttcatttttgaatttggagtccgggtcatgatgtataactatttcctgaccagaccaaactggcgataagattactcacgaaaaaaggattaatcctaaagattaggtgaaataacacaaaagtttctgtaagtgagaacttgaggttttttattaacacatcaggatcgcaagttgatatcatgaaaagataaacatttaatgtttacaatggattgcgtgacattctctggttaaatttatgtaataaaaattatgcggcaaataaattgccgcaacatattataccaacaggaacatacaaaaactcaacaacaaatatttccgagcataaatcaacccggagttacttattcactagcaagaaatttgtcgagataaggtacaacataaggaacagaagtctggaatataccattttcaatccagtaaagggtgtttgcccctgggcgtaaattaaaggcggtgagatatgcatcagctgcttcccggttcatccccttcatttcataaaccttgccaagcaacacataatttagccaggacatttcaagatcaatgccagtatttatcgcctggtaagactcatctgttttaccttttaccagagcactgaccgcttttatttgatatataatggacaggttgttcaattccggcagtgtaacaatgttatctatttctgtgttcagtgctgctaattgtttttcatctaaaggatgttgagaatggcgcacgatatcaactaatgctttttctgctctcgcgtaggtaaattctggggaactttgaacaatctcacctaataattcactggcacggttcaaacttttatcatcgccatgcagtaaataatcatgtgcctgataaaaattagttaataacgcaccacgatgcggcaaaattttctggagcgtctcctgcattcgttgtggccacggttggtttaacgctttacttaaactctccagtaaatcattttgaatcgccagctgattaccgttagtgatgacataacgtttatccagcatggtactaccatctgcattgtctaccaattttatgctcataaagcattgttgagcacggtattggcgctgattaacaaacgcaatagataatgttttaccggaactgctcggttcatcaatgttgtagttgattttgtcatgcaccataaaggtggagaaggtgttaagacttgtcgccaccaaatcacccacgcctatcgcgtaagagagctgatacggggaactccagctgttacaacttttatttaccatattaatgtcaatatcgcgtggattgagcaaaatacggcttttgctcataggaagacgtgtatcaagactactaaacgctaccagtgctacacagatacctaagctcaacaggaaaaaaaaccatacccaaaaggtagtgaatcgtttgcttttaactggggattgttcaggtggcgttgcggtgttttgaatgttaagactgtgggagggagaatctgtggcaggaaccgcctctggtatagggggagggctagatagcattatttcctctccctcttcttcgctgtaccagataaccggcaccattaatttatagccgcgctttggtacagtagcgatatagacaggactatcttcatcattatcttttaaactcttacgtagttcactgatactctgcgtcacaacgtgattggtgacaatacttctcttccagacattatcgataagttcatccctgctaagtacttcgccactgtgttgagcaaagaaaaccagaagatcgattaatctcggctcaagggtaagttgacgcccattgcggctaatttggtttatggacggagtaacaagccattcgccaacgcgaactacaggttgttgcataatagaaactcattcgaaaagggaatgatgcaatgataattgccacaacctatttttaccatctatagatgggtttatttacatattattggtgaatgcaagacgttatttttaccagccataaacttcttgattacatagtattacgaaaggattttactgagaaccagaagtaatattccttaccatcaaaattcatcatctttgccaaagaaaaatgttcagaaaataatccatggaaaattgtccggagcacttactattttaatggattgttagtctttgcatgagcaagcgaactgatacatttctctttgttctcattcagaaaatctcatcagtcgccgttcagaccggtgttgtgctttatggatgcgttacgctcctgatgacgtcatttgacgttcaacagcatcacggggccgcacgacatttcacgtcagttagtgctatagctcaggaacaaattttcccgaattgggatatgcccgcaaattgctggtgatgtggggagaatctggttgagttcggtagaattgatttggaggcagaacgcttaaatcgtggcgtcctgaaacgaaaaacggacctccgtggaggtccgtttatatgaatttggtgcccggactcggaatcgaaccaaggacacggggattttcaatcccctgctctaccgactgagctatccgggcaacggggcgcattaaaccgtaatctgcacatctcgtcaacctaatttcagtaaaagcgattcaactgcttaagattgcggcaaatcgcttcttttctgtgtttctgtcaggtcaatgcaccaccctggcggcagcgggcgaagcgcaggatatcttccgccagccgatgtgcagtgtcgacatccgcctggctacgattcaccagcattcggcttaaacagccttccagcaccagttccatctgctttgctaccatcgccggatcgtcaacttccagtgtggttaacagttcgtgggtgaaatcgtaggccgcgcttttttgctgatcggccagttgatgaatagggtggccaggatcgggataaaacgtacaggcagcgataaatagacagcccggatagcggttgtttttaacgcactcgcttaacgcctgataacgtgccagcagcttttgttcggcggtttgcgtttcgtccagcatcagctgacgacgccagacatctatctgttggctaagataacgcagcgcatcgtagaggattgcctctttgtctggccagaagcggcgtagctcgtccagtggataatccacacgttcagcaaccatctccagcgtggtgttggcaatcccttgtaattctaataatttcagggcttctcccagtacatcttcacgttgcacgctattttcctccgtctttcccactgcaagtgtcgttcacggttggcgatcgcgcaaatgtgcgctgaaggtttcagcatccataaagcccgtgacgcgtgcttgtggatgctcctggccttgtccgtcaaaaaagagaattgtcggtaggccaaggacattaagatgctttaacagcgccacatcttgtgcgtcgttggccgtgacgttggcctgaagtaagaccgtgtctgctaacgctttttgcacctgcgggtcgctgaaggtgtatttctcaaactctttacaggcgacgcaccagtcggcataaagatctaacatcaccggtttgcctttggcttcaacgagcgcctgatttaactcatctaccgttttgatttgtgtaaagttgagatgcgtctgagtttgcgcggtatgcgtcgcaccaaatgcccaatcctgaagtgggcgcacgctaaccaatgccgctgccagcagaataatttgcacaatacgcatccagccgcgtttagcctgtaggctggtgataaaggcccagccaaagaatgcgacacccagcgcgctccacaagcgtaatccccatacatcaccaatcactcgctccagcaggaagaccggcagtgcgaggatcacaaaaccaaacgcggttttgacttgttccatccacgggccgcttttcggcagcaagcggttaccaaagacggtaattagcatcagcggcaggcccatgcccaacgcatagagataaagcgtgccgccgcccagccacatgttcccgctttgggcgatatacagcagaatcgcgctaagcggtgcggtggtgcatggactacagatcagtccggcaatcgcccccataacaaacacaccgccaggactgccgccctgttggcgattgctcatcaacgtgagacgtgtttgcaggctagaggggagttgcagggtaaacaagccaaacatactcatcgccagcaaggtaaagacgatggcgaggccaatgagcacgtatgggtgctgtagcgccgcctggaactgtaaccctgcggcggcaaccaccagacccagcgccgtgtaggtcagcgccatcccctgcacataaataaaggtcagcaacaatgctctggcagtggagagccgctgtttaccacccagcacgatgccagaaatcagtgggtacattggcagcacgcatggcgtaaaggcgataccaataccgatcaacaacgcccagagcgcggaaaagggcaattgcgcggtgggctgctcttgctgcggaacagacacaggctgtggcgctgcgttgttggcgaccacttcgcttaacggaacggttttggtttctggcggataacagaaaccggcatcagcacagccctggtaggtgacagttaacgtcgctcccgcactcgcctggttgatggtgacgggaagcgtcagccgatcgcggtaaatctcgcttttgccgtaaaactcatcttcatgccagacgccttgcggcagctgcacgtcggcaattttcgcgtgttccggcgtaatgcggatctgtttacggtagaggtagtaaccgtctttgatctgccaggtcagattaaggtcatgttggttttgctgaaaatcaaaagcaaaggcttgatccgcggggacaaattgactacgtcccggcgcgtcgaataatccggcaaaaacggaagtgctgcaaagtagcaggatcagcgtaaagatgcgttgagccatgagaggtaatctgtgtctccttatgtcagcgtaaagatgcgttgagccaactgaggtaatctgtgtctccgtgtgtaacaggtaaaaccagaagttccggggtttgatatggatgatgagacttcaggcattccagcagtgcctgctggtgagatacggtagtttttaaaatcatctgcacttcgtattcttgctccagcttaccttcccagtaatagagagaggtagcgccggggatcaaggtcgcgcaggccgccagtttttccgccagcactttggcggctaaatcctgggctgtcgcttcatctggtgccgtacatagcaccacgacagacgcggtattgctacttttttcatcaagcataaacacctcgcaagaacagatggaaccgcaagagagaggtcactatacaacggacgggggaaggatgttagtcggcgggaaagaaagcggggcgtgaacgccccgcgattgatcattacagcatgaagctacccagcacgaagccgaagcaaacggccagggcaacacccagagtacccgggatgaagaacggatggttgaagacgaatttaccgatacgggtagtacccgtgtcatccatctgtaccgcagcaaccagcgtcgggtaggtcggcagaatgaacagaccagacaccgcagcgaaagaagcaacagcggtcagcggactaacgttcagtgccagagccatcggcatcagtgcttttgcggttgcagcctgagagtacagcagagcagaagcaaagaagaagatgacggccagcagccacggatgaccctgaatcacttcaccagcggtatctttgatccagtcgatgttgttggaaacgaaagtatcgcccagccacgcaacacccaggatacaaatacaggcgctcatacctgctttgaaggtgctggagttgaggatgttgtcggtatcgactttacagataacggtggtcagagttgcaacgctgagcatgatgatcaggattgcgttggtggtgttcatcagcggtttttcaaccagacccatgcttgggctgttgatgattgcatagataaccacgccaactacgcccagcaggaacagccagacggacgtttttgcaccggatttgatttcaatctgcttttcaccgcgcagttcaaccaggccctcttccagacgcttgcgataaatcggatcgtcagagagtttggagttgaacagcatagtgaccaggaaggacatcaccagaaccgccagcagggtggacgggatgaccacggagagcagatggaggtagctgatgccatgaccttccatcacggaagacatgtaaaccactgccgcactgattgggcttgcggtgatcgcaatctgcgcggataccactgcagtagacagcggacggcaaggtttaacgccttgttccttcgcaacttcagcgataactggcagtgtcgccagagagatgttgccagtaccagcaaagatagtcaggaaataggtcacgatcggtgcgaggatcgtgatgtatttcgggttacggcgcagcagcttttctgtctgatgaaccagatagtccagaccgccagcaacctgcatggcagaaatagcggcgataaccgccatgataatggagatgacatcgaacgggatgttaccgggtttaacgccaatagcggcaagaaccagcacccccaatccgcctgcaaaaccaatacctattccccccaatctggcgcccaagaagatcgccagcaaaactatgatgagttctacaactagcatattagccttccttgttttttaacaagttgatattagattgttatttttaagttactgctcacaagaaaaaaggcacgtcatctgacgtgccttttttatttgtactaccctgtacgattactgttcgctttcatcagtatagcgttttgctttgtaagccgggtgcatcagattctgtacggagaaaatatcgtcaagttccgcttcagtcaacagaccgcgttccagaacgacttcacgtacactcttaccggtttcggcacagattttacccacgatgtcaccgttgtggtgaccgatgaacgggttcaggtaagtaacgataccgatagagttgtaaacgtaaccttcgcacacttctttgttagcagtgatgccgttaatgcatttttccagcaggttgtagcaagcgttggtcagaatgtgaacggattcgaacatggcctggccaatgaccggctccataacgttcaactgcagctgacctgcttctgctgccatggtaacagtggtgtcgttaccgatgactttgaagcatacctggttaaccacttccggaacaaccgggtttactttagctggcatgatggaagagcccgcctgcagttccggcaggttgatctcgttcaggccggcacgtgggccactagagagcaagcgcaggtcgttacagattttggacatcttcacagccaggcgtttcagcgcgccgtgaaccataacataagcgccgcagtcagaggtcgcttcgatcaggtcttcagccggtacgcatgggaagccagtaacttcagccagttttttcactgccagcggagagtactctttcggcgtgttcagaccagtaccgattgctgttgcaccaaggttaacttccagcagcagttcagcggtacgttggatgtttttcacttcttctttcagcaggatgctgaaagcgcggaattcctgaccgagggtcatcggtactgcgtcctgcagctgggtacgacccattttcaggatgtcctggaattcgacagctttacgttcaaagccttcacgcagttggttaatcgcatctaccagcttaatcagggaagagtaaactgcgatacggaaaccggtcgggtaggcgtcgttagtggactgacatttgttaacatggtcgttcgggttcaggtactgatattcacctttttggtgacccatcagttccagaccgatattggccagcacttcgttggtgttcatgtttacggaagtacctgcgccgccctggtagacgtctaccgggaactgatccatgcattttccgttgttcaggacttcatcacatgcggcaatgatggcattcgctacacttttaggaatggtttgcagctctttgtttgccatagctgcggcttttttaaccattaccataccgcgaacaaattcaggaatatcactgattttgttgttgctgatatagaagttttcaatcgctctcagagtgtgaacaccatagtaggcatcagctggaacttccctggtacccaacagatcttcttcgatacgaatgttgttactcatgtgaaccttctttttcaagctgccaatgatttgctttaaacacacagaatatatgtggtttcgaatgtttttcgaccgacgattatcccctgcatcgaccgaatacccgagatcatatgctgcttgaggatttctaccgtaatctggatcactttaagtgtcggtttttaccccttaattattaatttgtgaaatagatcaccgctttgggattactaccaaaaatagttgcgcaaacatcttgaaattttgctaatgaccacaatataagctaaacgcgattcgcaacccattcaggtagccggggttaaccggctgctattacaggagaaacctttgcgctggttaccttttattgccattttcctttatgtctatattgagattagtatctttattcaggttgcccatgtattgggggtattgctgaccctcgtgctggttatattcacgagtgttatcggtatgagtctggtacgtaaccagggctttaagaatttcgtgctgatgcagcaaaaaatggcggcgggtgaaaacccagcggcggagatgattaaaagtgttagcctgatcattgctggtttgctgcttttattaccgggcttttttaccgacttcctcggtcttctacttttattgccgccggtgcaaaagcatctgacagtgaagttgatgccgcatttgcgcttttctcgcatgcctggcggcggttttagcgccgggaccggtggcggtaatacttttgatggtgagtaccagcgaaaggatgatgagcgcgaccgccttgatcataaagacgatcgccaggattaatgtcgaaacgccggattatgtggttatgccattttccggcgtttttcgttttggcagcaacagccataaccccgccagcatgatcagcgcatagagacttttccagccgaccattgccagtaacagaacgcataacagcccgccaaccaccgccagtagtcgataacgtccttgcaataatttacagcctgccagcatgcataacagataaatcataataaagatgccattggcataaataataagagcgtccagattgatctctaaagcatgaatcaccaaagtgctcaccacacagcagccgagcaccgcattgagggcattattcgggatatggcgagaagagaggcgtgccaggtagtggtcaggattatgttgcgcctggctccagaccaggcgggcgaagctctgtatataaatgttgagactggcaaagcaggccagatagccaatcacgcaggcaatccataacgctcctacaccgaacaactgcactacaatttttggaaggcttgctgccgccgccattttttcaccataggcgtcgaagtgtaagacgactaccgtacagccccagtagactaatcctgccagcagcagaccaatcatcaaagcacgaggaaaatcacgctctggatttttaaattcgctggcgagatgggcaaatgcctccagaccgacaaaacaccagaacatcacacttaacgcagcaaataacccggtaagttcgatattaccaggtgccggaaaggggatattcgcaggtttgatatcgcccgcccaccagatagcgacaatcagcgcgacgataagtccggcaataacggtttgtagattagcactggaactggcaccgcgagtaccgatataccacaccagcgccagcgtaccgagttctgccaacaacagttgccagctatgccagccaaacatcgcctggccgaacccggcggcaatttgtagtgcggcaggcaaacccacgggaatgacgcttaaaaacagccagccggtgactcgctcaagccggctaccaaacgccataccgacgaagtgcgcgacgccgcctgcgctgggatagtggcgacccagaatcgcaaacacaatcgcaatcgggaacactaagataatcaaaacgggccacgcccacaggctgttattgcccgctaccagcgcagctaacgcaggaacggcaaacacgccagtgcctaataaactcgtgcttagcaggccaatgccctgggccagccccagttcttgtttgagtccactcatgggttgatgtccgattgcgcccaaattttgggcaactgcgtagattttcgatggtagcacaatcagattcgcttatgacggcgatgaagaaattgcgatgaaatgtgaggtgaatcagggttttcacccgattttgtgctgatcagaattttttttctttttcccccttgaaggggcgaagcctcatccccatttctctggtcaccagccgggaaaccacgtaagctccggcgtcacccataacagatacggactttctcaaaggagagttatcaatgaatattcgtccattgcatgatcgcgtgatcgtcaagcgtaaagaagttgaaactaaatctgctggcggcatcgttctgaccggctctgcagcggctaaatccacccgcggcgaagtgctggctgtcggcaatggccgtatccttgaaaatggcgaagtgaagccgctggatgtgaaagttggcgacatcgttattttcaacgatggctacggtgtgaaatctgagaagatcgacaatgaagaagtgttgatcatgtccgaaagcgacattctggcaattgttgaagcgtaatccgcgcacgacactgaacatacgaatttaaggaataaagataatggcagctaaagacgtaaaattcggtaacgacgctcgtgtgaaaatgctgcgcggcgtaaacgtactggcagatgcagtgaaagttaccctcggtccaaaaggccgtaacgtagttctggataaatctttcggtgcaccgaccatcaccaaagatggtgtttccgttgctcgtgaaatcgaactggaagacaagttcgaaaatatgggtgcgcagatggtgaaagaagttgcctctaaagcaaacgacgctgcaggcgacggtaccaccactgcaaccgtactggctcaggctatcatcactgaaggtctgaaagctgttgctgcgggcatgaacccgatggacctgaaacgtggtatcgacaaagcggttaccgctgcagttgaagaactgaaagcgctgtccgtaccatgctctgactctaaagcgattgctcaggttggtaccatctccgctaactccgacgaaaccgtaggtaaactgatcgctgaagcgatggacaaagtcggtaaagaaggcgttatcaccgttgaagacggtaccggtctgcaggacgaactggacgtggttgaaggtatgcagttcgaccgtggctacctgtctccttacttcatcaacaagccggaaactggcgcagtagaactggaaagcccgttcatcctgctggctgacaagaaaatctccaacatccgcgaaatgctgccggttctggaagctgttgccaaagcaggcaaaccgctgctgatcatcgctgaagatgtagaaggcgaagcgctggcaactctggttgttaacaccatgcgtggcatcgtgaaagtcgctgcggttaaagcaccgggcttcggcgatcgtcgtaaagctatgctgcaggatatcgcaaccctgactggcggtaccgtgatctctgaagagatcggtatggagctggaaaaagcaaccctggaagacctgggtcaggctaaacgtgttgtgatcaacaaagacaccaccactatcatcgatggcgtgggtgaagaagctgcaatccagggccgtgttgctcagatccgtcagcagattgaagaagcaacttctgactacgaccgtgaaaaactgcaggaacgcgtagcgaaactggcaggcggcgttgcagttatcaaagtgggtgctgctaccgaagttgaaatgaaagagaaaaaagcacgcgttgaagatgccctgcacgcgacccgtgctgcggtagaagaaggcgtggttgctggtggtggtgttgcgctgatccgcgtagcgtctaaactggctgacctgcgtggtcagaacgaagaccagaacgtgggtatcaaagttgcactgcgtgcaatggaagctccgctgcgtcagatcgtattgaactgcggcgaagaaccgtctgttgttgctaacaccgttaaaggcggcgacggcaactacggttacaacgcagcaaccgaagaatacggcaacatgatcgacatgggtatcctggatccaaccaaagtaactcgttctgctctgcagtacgcagcttctgtggctggcctgatgatcaccaccgaatgcatggttaccgacctgccgaaaaacgatgcagctgacttaggcgctgctggcggtatgggcggcatgggtggcatgggcggcatgatgtaattgccctgcacctcgcagaaataaacaaacccccgggcagaaatgtctgggggtttttcttttggtcatctttctagtataagattcagacacggacgacgcgagtggcgtccagctcattgattatggggaataacatgcacgtaaaatacttagcagggattgtcggtgccgcgctactgatggcgggttgtagctccagcaacgaattgagtgctgccggtcagagtgtacgcattgtggacgagcagccaggcgcagagtgccagctgattggtactgcgacaggtaagcaaagcaactggctttccgggcaacacggagaagaaggcggttctatgcgcggcgcagcaaacgatctgcgcaaccaggcggctgcaatgggcggtaacgtgatttatggcatcagtagcccgagccagggaatgttgtccagttttgtcccgacggatagccagattatcggtcaggtttataagtgcccgaactgatgtgatccagaggctgggtgacaaacgtataattgcctgatgcgcttcgcttatcaggcctacataaggcattgcaactgattgaatgcttgagaatttgtaggccggataaggcgtttacgccgcatccggcatgaccaacgatcacgttatcagtcatttcaggctggatggctccagcctcgcattagcaaagatgagattatttcgcctgtggtgcagttttgctggtggattgaacacgtaagtgatgcagcgcgcgtaagcattgatcctgggttagcggttgggcgttattcgccgctacggtgcgaacatagacctgacatggcacacccgcgagttttttcagtcgtgggctgaaatcaagcattcggcgagtgatcgcttctatttctttacccggcgttgcttcacgcgttttcaccactgcgccgctaaattgttctttgccactttcatctttaaagcggtaaagcaccgccagataatggtcgaacaagttatgtttccattccggttgggaataggtgtcatattccagattgccattgtcctggcagtcaacgtcgtataacggcaggaaatctaacagactggtaatacgtaatgccagttcacgcatttccgcattattaattgcatgaatgattgctcgcgccagcatttcaatctgcaactcattgacgactaactcacatttgctaccgtcatgtagcgttaatacgaaggtaagattttcgccttgattatcggtaagttccagcgtgttaacccgacgattaatatcggcatttttaagctcatcaaccagaatttctgggatgttttctgccattttcttaatgactttatcgcgagcttgctcatactgaaggtgtgcagcagcatccagtttatgcttttgatgcagacgactttccagcgcaatcagcaggtcgcgcagttccatgacagacataaagaacaagctttctttattgcgaggttctttaattttcagcgccagtgcaatgaaattattactcttgcgaataacaccggtattaacacccttgatgcttatggccatgtaggttctccctaaccatttctcaattaaataattaattttaatttataagccagataaatgggcttggtagtaatagttgttaaaataacataaatagccgtactcactctatataaacagaaaagaaaggttaattattggtgttagctatataaaaagtaacaacagcaatgcatatgaataattaaaggttatgcaacgggcaaagattaaacttcccagtttaatgacaggttgctgtacttgcgtttgttgctcttgccggatgcagcgtaaacgccttatccggcctacagttcattgcaaatccattcaatttcaatgcacgatgtaggcctgataagcgtagcgaatcaggcaattttaatgtttaacttccctgtttaatcagttactgctggcgtagctggagatccagcggcgttttgctgggttcgccgccaatttctcgcgccagtttcggcaccagatatccgctcaccagtgtcagcaactcacgcataatctgccgtgcttcgtcatcactcaccataaaatgcgccgcgccctgtactttatcgagcacatgcaggtaatacggcattacgccggcatcgaacaacgcattactcaggtttgccagcgtttgtgcgttatcgttcacatcacgtaacagaacgctctggttcagcaaagtaacgcctacccggcgcaacttagccatcgcctgacggaatgtttcatctacctcattggcatggttgatgtgattcaccagcaagatttgcagcgtagaacgggcaaagcattcaaccagcgcctcggtgatacgtgccgggatcacaatcggcagacggctgtgaatccgcagacgttttatatgcgggatggcttccagttgtgtgagcaaccagtccagctcgtgatctttcgccatcagcggatcgccgccggagaaaatcatctcgtccagttccggatgcgcagcaacatactcaagtgcagtttgccagttacgcttgttgccctgattttcggcataggggaagtgacgacggaagcaatagcggcaatttaccgcgcagccgcctttgaccagcaaaagcgcccggttgtggtatttatgcaacaaaccaggcactacgctgtgctgttcttccagtgggtcggtggagaatccgggcgcgatgacaaactcatcttggctggtaagtacctgacgcaaaagaggatcgtccggattgcctttctccatgcgatcgataaaactgcggggcacacgcagggcaaaaagctttttggcgctgcgtccggctaacagtttttcctccgcgtctatattcaaaagacgcagaagttcatcaggatcggtcacaacatcggcaagttgcgttaaccaatcttctctggatggggtatttagggttacaatatgcgccattttgtggcttagctaccaattaacaaatttcagagggccttatggcaacgtactatagcaacgattttcgtgctggtcttaaaatcatgttagacggcgaaccttacgcggttgaagcgagtgaattcgtaaaaccgggtaaaggccaggcatttgctcgcgttaaactgcgtcgtctgctgaccggtactcgcgtagaaaaaaccttcaaatctactgattccgctgaaggcgctgatgttgtcgatatgaacctgacttacctgtacaacgacggtgagttctggcacttcatgaacaacgaaactttcgagcagctgtctgctgatgcaaaagcaattggtgacaacgctaaatggctgctggatcaggcagagtgtatcgtaactctgtggaatggtcagccgatctccgttactccgccgaacttcgttgaactggaaatcgttgataccgatccgggcctgaaaggtgataccgcaggtactggtggcaaaccggctaccctgtctactggcgctgtggttaaagttccgctgtttgtacaaatcggcgaagtcatcaaagtggatacccgctctggtgaatacgtctctcgcgtgaagtaatgcggttgtggtgcggcctgcaggctgcaccatcacttattcaggtcagagatgatgaaacgccttatcgttcttgttttgcttgccagcacgctgctcacgggctgtaacaccgctcgcggtttcggcgaagacatcaaacatctcggcaactccatctctcgcgctgccagctaatttttcttctcttccgaaaaatcatcagattcccatcatttttggcgatgttgtctattattaatttgctataggcaaacataaataacattacctaaaaggaagacgttatggtgaagaagacaattgcagcgatcttttctgttctggtgcttagtacagtattaactgcctgcaacaccacgcgtggcgttggtgaagacatttctgatggcggtaacgcgatttctggcgcagcaacgaaagcgcagcaataagcaataacggtacgacagctgtgtcgtgccgtttgttttttctgcgatagtcacaaaggtaatagttgaaattcccctgccacctggcaaaatatccgttcaaccatcagctttgcaggacgacctgcaaacgcctcttttcaccggggacggccccaattctccggagcctgatatgtcctggattatcttagttattgctggtctgctggaagtggtatgggccgttggcctgaaatatacccacggctttagtcgtttgacgccgagtgttattactgtgacggcgatgattgtcagtatggcgctacttgcctgggcgatgaaaagcttaccagtagggacggcttatgccgtgtggacgggtattggcgcagtcggcgcggccataaccggcattgtgctgctcggtgagtccgctaacccgatgcgcctggcgagtctggcgttaatcgtattggggattattggtctgaaactcagcactcattaactaccaggctgctgtacccaaataaatttactgacatcaaacccttcccgggtcgcgactgccagcatctcctgtttcacttcgtcagaaatggttggcgtgcgggagagtatccacaggtagtcgcggtccgggccgcaaaccagcgcatggcggtattcccgatcgagtgcaataacgttataaccgccatagaaaggaccaaagaaactcactttcagcgcagcgcgagttggtgcgccggtaaagtacgctttcccttcactctgctgccacattcctctgtcagggttatagcctttattaatgacattcaggccgccgtcatcacgcaggctgtatgttgcggtgactttttccagtccacgttcaaagcggtgatcaaaacgggcaatctcataccaggtaccgagataacgtttggcgtcgaaattatttactacggtcacgccacgcggcggcgtaggagaactgcaggcaacgaccagaaatgcagctgtcgctgcggcaacgagagggagcaggcgcataaatgtttccttactggtttttttctaagtgtagatgacagcaaggaaaagcggagaaaaggtccgaaaattcggacccgatggaattttactgtagagcgttaagaatctgccaggcggcgtcgactctcgctggattgggatagtttttgtttgccagcatcacgatacccagctctttttctggaataaacgcgacatagctaccaaatccgccggtcgcccctgttttatgtacccaacttgcgcgtactgcaggagttgggggcgtaatcgcttttacggggcgtgctgccagtgcaattttattgtcactgccgttaatgatgctgtcaggatttaccggccagtccagcatttcccagcccaggccctgatacatatcgccggtttgccagtagcgagattgtgccagttgtatcccttgttgaagcgttttctcattgatatcaaggggttttaaattgctttgcacccagcgggccatatcttcaatggtgctcttcacaccataagcttcagcatctaacgccccagggctaacatgcactgccttaccttcgcgatatccccaggcgtaattcttttcttctgcgggcggtacattaatccacgtatggttgagtttgagtggctggaagacacgagtttgcatcgcctgctcaaaactcaaaccagacggcttcacagccagtgcgccgaacaaaccgatactggagttggcatacagacgttgtgttcctggagcccatgcaggctgccagttttgatagaagcgcagcaagtcgctactggatttcacctcatccggcacctgcaatggcaggccgccagcagtgtaggttgcgagatgtaatagtgtgatcccattccactgtttagcggtaagttcaggccagtattttgttgtgggatcgcttaacttgatttcccctcgagcaatagcgtcgccaccaagcacgccagtaaatgttttgctgacgctacctaactcaaacaacgtttgctgtgtgacgggctgctttttggcgatgtccgcatagccccaggtaaagtaataaggtttaccctgataaattaccgccaccgccatacccgggatcttttgttgctctataagcggggtaattgtgcgatgcacaatatcgttgatttgttgaggggcagcaaatgtggagcaagaggcggtaattaataaggcgcagagcgtcgttttgaacatagggtctggtttccatacaaaacggcccgccataggcgggccggatttacattggcgatgcgttagattgtaacgacaccaatcagcgtgacaactgtcaggatagcagccagaccgtagaaaacccatttgcccgcaggtacgtggattttcagatcgtgcatcgcgtggtgcatacggtgtaaaccacaccacagcggcagaacgatcatcaggaacaggaatacgcgaccaatgaagctctgcgcgaacgccagaacgcgctcgtagctcagcgcatcacccggaaacaaccccagtggcagcagaatacccaccagcaggatcatcaccggcgcaatgatggcgctccacataccaccggccccgaagaggccccagaataccggttcgtcagaacgctttggatttggattaatcatctcaggctccttaccagtacagggcaacaaacaggattacgatggtggcaaccacagttaccgcccagagacttttgataattggctctggtcccattttttcgtcttttacaatgatattggccgctttcggtgccagttcaaaccaggttttggtgtgcagcagagctgccgccagagtgatcaggttaatgatcacgataaccgggttttgtaaaaagtcgacgaatcccgcccaggcttccgggccatttttcagggcaaacagcccgaaaatcagttcaatgctgaaccacacagccggaaccgccgtgccttcgcgcagcatgtaaaagcgataaaacggcaattttttccaccaggtggacgtcattggccgtacatacggtttacgtttagtcgtcatgttgcactccttagcgtggtttcagggtcgcgataagaaagtctttgctactttctactttgccctgctgaatggccgcagccggatcgacgtgtttcgggcagacttcggagcagtagcccacgaaagtacagctccatacgccgttctggctgttcaactgcgccatacgctccttcttaccgtggtcgcggctatcttcgttataacgatgcgccagcgtaatggcagccggaccgatgaactctgggttcaggccaaactgcgggcacgcggcgtagcacaaaccacagttgatgcaaccggagaactggtgatacttcgccatctgcgccggggtctggatgttagtaccctgatccgcggtgcgggagttgccgatgatgtacggtttgatcgcttccagactttcgatgaagtgggtcatatcgaccaccagatcgcgttcaatcgggaagttagctaacgcttcaaccttcataccgtcggtgtaatcacgcaggaaggttttacatgccagttttggcacgttgttaaccatcatgccgcaggaaccacaaatcgccatacggcaggaccagcggtagctcaggtccggtgccaggttgtctttgatgtagcccagcgcatccagtaaactggtagttgcgtcataaggcacttcatagaatgcgctatgcggtgcggtatcgacttccgggttatagcgcaccacctcaattttcaggtttttcatctcagccattcgccttctccttcttattggctgcttccgccttatcggctgcatccgcttcgccaccgtaaacgcgtttagctggcggcagcgtagtaatcttcacgtcgctgtactccaggcgagtcgtgccatcagcatcgcggaaggcgagggtgtgtttgaggaagttgacgtcgtcacgctcggtgcaaccttcgtccagacgctggtgcgcgccgcgggactctttacgtgccattgcggagtgcgccatacattcagcaacgttcagaccgtggcccagttcaatggtgtagagcaggtcggtgttgaacacgctggaagtgtcggtgatgcgcacgcgcttgaagcgttcctgcagctctgccagcttgtcgatggttttctgcatcagttccggcgtacggtagataccgcagccttcttccatagccaggcccatttcgtcgcggatcttcgcccagttttcgccgccatcctggttaaccagatctttcagacgttgttcaacgccagctgcctgcgcttcaattgccgcttcgttgccattaccggcagttgctgcacgctctgtcgcttgttcaccggccagacggccgaagaccaccagttccgccagggagttagaacccagacggtttgcaccgtgcagaccaacagaggaacattcacccacggcgaacagacctttaatgcgggtttcacagttctgatcggtttcgataccgcccatggtgtagtgtgcggtcggacgtaccggaatcggttctttaaccggatcgacgccaacgtacgctttcgccagttcgcagatgaacggcagacgttcatgcagttttttctcgccgaggtgacgcaagtcgagataaaccacatcgccacgcggcgtggagatggtgttgcctttacgccattcgtgccagaaggcctgagagactttgtcgcgtggacccagttccatatatttgtttttcggctcgcccagcggagtttccgggcccatgccgtaatcttgcagataacggtagccatttttgttgaccagaataccgccttcaccgcggcaaccttcggtcatcaggataccggaacctggcagaccggttgggtgatactgaacgaattccatgtcacgcagcggaacgccgtggcttagcgccatacccataccgtcaccggtaacgatgccgccgttggtgttgtaacgataaacgcgacccgcaccgccagtagccataacgaccgcgttagcacggatctgcaccagcgtgccttccatcatgttcattgctaccaggccgcgaacatgaccatcatcaaccagaatatccagcacgaaatgttcgtcaaaacgctggatctgcgggaattgcagagaggtctggaacagcgtgtgcagcatatggaagccggtcttatcggcggcgaaccaggtgcgctcgattttcatgccgccgaagcgacgtacgttgacgctaccatccgggcgacggctccatgggcatccccacagttccagttgggtcatttcggttgggcagtggtggacgaaataatccacgacatcctgctcacacaaccagtcgccacccgctactgtatcgtgaaagtgatattcgaagctgtcatgatcctgcgcgacagcggcggagcccccttctgcagcaacggtatggctacgcatcgggtatactttactgattagtgcgatttttgcattcggatttgcctgcgcggcagcaattgcagcacgtaatcccgcgccaccggcgcctacaatggcaagatcggcttgaaaggtttgcacgacattcctccagattgtttttatcccacagccacgtacttcagggtaagtacctgaaagttacggtctgcgaacgctattccactgctcctttataggtacaacagtatagtctgatggataagtctgaaatttgacgagatcgatttttttagtgcgcaagagggctaaattatcactgaagatgattaatttaattactaaaccatcagatcgtgctttttttagtcactgcccaccgctgtttgattcctgcgtaaaatttgtctcgccgtcgcgttgcgagtagacttcgtgcccttgtcaaaaactggagatttaactatgagcgaaacggcatcctggcagccgagcgcatccattcctaacttattaaaacgcgcggcgattatggcggagatccgtcgtttctttgccgatcgtggagtgctggaggtggagacgccttgtatgagccaggcgacggtaaccgatattcatttggtcccgtttgagacacgtttcgttggccccgggcatagccaggggatgaatctctggttaatgaccagcccggaataccatatgaaacgcctgctggttgccggttgtgggccggtattccagctgtgccgcagcttccgtaatgaagagatggggcgttatcacaaccctgagttcactatgctggagtggtatcgaccgcactatgatatgtaccggttgatgaacgaggtggacgatctcttacaacaggtgctggactgcccggcagcagaaagcctttcttatcaacaagctttcttgcgttatctggaaattgacccgctctctgccgacaaaacgcaactgcgggaagtcgcagcgaaactggatttgagcaatgttgctgataccgaagaagaccgcgacacgctgctacaattgctgtttacctttggcgtagagccaaatattggcaaagaaaaaccgacctttgtgtaccactttccagccagccaggcaagtctggcgcaaatcagtaccgaagatcatcgggtcgctgaacgctttgaggtttattataaaggtattgagctggcgaatggtttccatgaattgacggatgcccgtgagcagcaacaacgctttgaacaagataaccgtaagcgcgcggcgcgcggtttgccgcagcaccccattgaccagaatctgattgaagccttgaaagtcggtatgcctgactgttccggcgtggcattaggtgttgatcgtctggtgatgttggcgctgggcgcggagacactggctgaagtcatcgcctttagcgttgaccgggcataattctgaaaaattactgaattaacagcgaagaatggcgtgataagcgccattctgtagcatatgttttcatttttccgttaaaggccacaatttaagactggatatttgatatcatccaggtatcaattctgtattggtttttacgctgcctgctcaatgttgcgcagtgcagttcagtgggcacgtgttatacacgcgctgaaatgaaggatggtttcatgcctcacacgataaaaaagatgagtctgataggactcatattgatgatctttacttccgtatttggatttgccaatagcccaagcgcttattacttaatgggttatagtgcgattcccttttatatattttctgcattgttattctttattccattcgccttaatgatggctgaaatgggagctgcttatcgcaaagaagaaggcggtatctattcctggatgaataatagtgtcggaccacgttttgccttcattggtacgtttatgtggttttcctcttatatcatctggatggtgagtacctccgcgaaagtttgggtaccgttcagtacattcctctatggtagcgacatgacccagcactggcgtattgccggactggagcctacgcaggtggttggtctgctggctgtggcatggatgattctggtcaccgtcgttgcttctaaggggattaataaaattgcccgcattactgcggtgggcggtattgcagtaatgtgtctgaatttagtattgctgttagtaagcattactattttgttattaaatggtgggcatttcgcgcaggatattaatttccttgcaagtccgaacccgggttatcagtccggtctggcaatgctaagctttgtggtatttgccatttttgcctatggcggaattgaagcggttggtggtctggtcgataaaacggaaaatccagaaaagaactttgccaaaggtattgtttttgccgctattgttattagtatcggttatagcctggcaatatttttatggggcgtcagcacaaactggcagcaggtattaagtaatggttccgttaacctcggcaatattacctatgtgctgatgaagagccttgggatgacgctgggtaatgcactgcatttgagtcctgaagcgagtttgagcctgggcgtatggtttgcgcgtattactggacttagcatgttcctcgcctataccggtgcgttctttacgctttgctatagtccgttgaaagccatcatccaggggacgccgaaagcattgtggccggaaccgatgacgcgcctgaatgcgatggggatgccgtctatcgccatgtggatgcagtgcgggttggttactgtcttcatcctgctggttagctttggtggcggtaccgcaagcgcgttctttaacaagctgacgctgatggcgaacgtgtctatgacgcttccttacctgttcctcgcgctggctttcccgttctttaaagcacgtcaggatctcgacagaccgtttgtgattttcaaaacgcatttgagcgcaatgattgcgacagtggttgtcgtactggtggtgacatttgcgaacgtcttcaccatcattcaacctgtggttgaagccggagactgggacagcacattgtggatgattggcggccctgtcttcttcagcctgttagcgatggcgatttaccagaactattgcagcagagtggcaaaaaatccgcagtgggcggtggaataacccgatgccctatcgtctacctgacgatagggcgtaaagacaggaaatgttatggatgacaccagccgggacccggcaataaccgaagatgaaatcagggcgctgcaattttctgccggggatgtagcggaaatagagcagacgattctctcttttgtcgatgcctgccacacccgtaaagtggcgatggtggtgggtagcaccattaacaccctcaaagatcgcgatggtaaacggtggggaaacctgccggatatttattgcgcttatcttatccgatgtctggtttttcgcggggaattagtgggatacggcgatttgtttcgtatgcgctatagcgaaattaagcgaccggttaccttatgagtgcgcgcatgtttgtcttatgctgcatctggtttattgtggcgttcctctggataaccatcacttccgcgctggacaaagagtggatgattgatggacgcgggattaacaacgtctgcgatgtgttgatgtatctcgaagaagacgatacccgtgatgttggtgtgataatgacgttaccgctctttttcccttttctctggttcgctttgtggcgaaaaaaacgcggctggtttatgtacgccaccgcgctggctattttcggctactggctgtggcagttttttctgcgctatcagttttgtttgtgagccggattggttcatccggcacacaaacttacaaacttcccgcctgacgacctttgcccgcagacgtcagcgttctccccgtttgtttaccgttgaggctttccagacgcatctggaagggcgggaatggcatatcgataccgtgggcatggaagccagccagaatcagctggtggatctcatggcgtagcggcatacggtgacccatctcagcggcgtaaatacgcagctcgaaaatctgaatcccctgttgcagatccaccaggaagacttccggtgccgggttgtcgatcaccaggctgcagcgacgcgctgcggtgagcaggatttccgtcacttcttcgctattggcatcggcaggggccggtatcgtcaacaccacgcgcgtgacgctgtcagagaggctccagttgataaactgctcggtaataaacgccttgttcggcacgattatctctttacggtcccagtcgctgatggtggtggcgcgggtgttaattttcgtcacgctaccggtgagatcgcgaattgtcaccgtatcgccaatgcgaatcggtttttcgaacaggataatcagaccagagataaagttggcgaaaatttcctgcaaaccaaaaccgagaccaacaccgagcgcggcaaccagccactgcaatttgctccactcaataccaatcatactgaagccgaccagcccgccaatcagcatcagcagatatttggtgatggtggtgatggcgtaacccgtacccggcgttaaatccaggtgctgcaaaatcgccagttccagcagcgcgggcaagttgcgcaccagctgcgtggtgatgataaacaccagaatggcaatcagcaccgcaccgagggtaattggctccagactttctacgccctgtaccgtggaggtgacatcccacaggctaatattttcgaggaagccgaaagcggaatggatttcactccacagcacaatgacagaaagcagggcgatcaacatcaaaatactgcgcaccagccgcaaggattgcgcactgatggcatcgagatcgacttcgctttcatcgacttcaattgctccttccgggctactgtgatgatgcgcttcctcttcgccacgcgcacgttgcgctaacatctctgcccggcgatgcttcgcccgatcaaacgccagcctgcggcgctggatcagcatccagcggcggataacgtgataaaccaccagtagcaggaaccagatggcaacgctggtttcaagcctcgctaacagcgcctgtgccgttgccagataacccaccgcgctcgccagaatggcaaccaacggcgcgccaatcatcatgttccacagcatatggttggtaatgttgtcgccgctgccctctttgttgagatacagcggaatcccggcctttttcaggctgagggtgaccaccgccagcgcaccgcaaatgaggataaagcaaagccgtcccaggctaccggagaattcacggtcgtcgaggttatcgaacatcatcagcgccataatcagcggcacaataagcccgatgctcatcaggtagtagcgcatcccacgggaaacacgttcgcgcggccagccaaaatgagcgataaacaagccgttcgggcgggcaaaggtggcgcaaatcatcactacccacagcagcggcacggtggccgttacaccatcgccaatcgcgaccgccagcggataaggccacgcctcgcgcaagccgtaacccagcgtcatccacagcaccggtaacggactcgcgacgagaatgctccagaaaagagtgcgcaacgtcagccagaagtgatcctgagtcactttgccaactttcgccgcgctacgttcaagaaaacgggtgaaatagcggcggctgtaaatactgcaaccgaccagaatcaacgcgccaaacagcggcaaaattgtctctttgctggtcagcatcatcacactggctttgcccaactgactgaaggtgtccaggctaatgagacgacgcagatcctgggcgatttccagcggccaggcgatggtcatcgggcgcacgtcagaggtccagaacagatagcggtgcgttgcttcgttcacctctttcagcgcatcctccagttgcccgttggagactttcagcttggtcagttccaatagtagcgtgtcgccaccctgcaacaaactgttcagcaactcacgctgagtgcgcagttgtgcttccagaatacggttttgctcggcagtcagcggctgaccgtcggcctgatgaatttgccgtagcagcggctgtttattaagcagatcctcataacgtaaccgttgcacacgcaactgcgccatttcggtatcaagctgttgtggtttcggcatttccggcagccgtgccacctgcgcccgcagcgcttcgccgagcagattggagcttcccagccattggctctgttcacgcagcgtattcaacgcctgccggacctgtaacgtctggctggcagcctgacgctgttggctggcaacgagatccatccgctgcgcctgttgattcaaagccgcgcttagttcgcggttaattttgaattgcgcgacgatatctttcggcaaatcggcgctgttttctgccagcaattcggtactttccagcgcccgctccgcctcaagctgacgttggctgtttaattgattacgcaaggcctgcaaatacgcatccagttgctggctctctttttccgccagctcactgcgtaagcgcgctaattcctggcggttattggcagacagctgcgccagctccagttcatcaacgagcgccttaagacgtgcagagtcagactgcaacgcgaaattttgtgcctgattgagcggagtattgccggtaagcgttcccaggcggcgctcgatctcatttaactgacggcgggcgtcggtttgctgttgcggcagttgattcaggctatcggcaatctcgcgggcgcgctcctgctcttgctgggcctgacggcttttatccagcaactggctgctgacctggagaatttcctgattcagcgcgtcggtagacattcccgggctcacgctgcgcggctcgtcacgcatgttgtttaattgtgcgcgcagagtagcggagagtttcggataattatcgataacttgctgatattgtttgatgcgctcaagggaaccttttcgttcctcaagcgcatttaaggcagactggagcgcctctacgacttccggctgtgcgggtttcgccgcttttgcctgctccagttcctgagtgatttgtttgctatcgggggccgtcgcggcgtacgccccccaactgaggcaccaggccatcagaaaagtgataatcaggcgcacgtcagcgtttcctttgatggattagacctggtcttttttgtcgtcaaccaatgggctggcgtcgtgttctgcttcgatctcttcagcaggaagcggggcaggttcagcgtctggcgtaacaaaggtttcggtagatactgccagcggctggccaattttcgtgacagacaggctttccagttgctcaaccagattcactttacccggtgcaaacaggttgataacggtggaaccgagtttaaagcgacccatttcctggcctttcagcagtgccacagaaccgtcgttttccccggcaggccaggtccagcgcttgatgataccttcgcgcggcggcgtaatggtgcccgcccagaccgtctcaatgctgccaacaatcgtcgctccgaccagaatctgcgccattgggccaaattcggtatcgaaaaggcaaatcacgcgttcgttacgggcaaacagattcggcacgttctgagccgtgagatggttaacggagaagagatcgcccggcacgtagatcatctcacgcagaataccgttgcacggcatgtgtacgcggtggtagtcacgcggggagaggtaagtggtcacaaacgtaccgttgcggaacaggtccgccatcagatagttgcctgccagcagggcttcgaggctgtagttgtggcctttggcttgcaggattttatcttcttcgattttacccaactggctgataacgccatcggcaggcatgaccagtacattcggatcggtatcgattgggcgtacttcgtcacgcagcggacggacaaagaattcgttaaaggtgcggtagctggcggtgtccggcttttgcgcctctttcatgtcgaccttgtagtatttaacgaacagatcgataaccagttttgtcagccatcctgcccgcttgcttgcgccccaacccgccaggcgagtaagccatagtttcggcagaatgtactgtaggctaagtttaaaactatttaacaaggtagcctccaggccattgttttgtcgttcctgatccggcctacatgccggatcctgaaaaaaaggggacgattctaacgacggttagcttaattgtcagtcatccgtatcagaaaagtttttacgcgtttttacctgcgccatgctttccagaatacggtgatagttttcgaaacgggtttccgcgattttcccttcctcaaccgcttcccggatagcgcagcccggatcggtatcgtgtttgcaatcgcgatatttacacagacctaaatagtcatggaattcgacaaagccctgagtgatttgttccggctccaggtgccagaggccgaactcacgcactcctggggagtcaatcacatcaccgccgtgcgggaagtgatacagccgagcggcggtcgtggtgtgctgaccgagcccgctgttgtcagagatatcgttggtcaggatctctttttgcagccccagcaacgcattcagcaggctggatttgccgacgccagactgcccggcaaaaatgctgatgcgcccggtcaacgcctcttccagcggttttagcccatcctgagtatggctggaaaccatcaatacgcgataaccgatattgcggtagatatccatctgctcgttgacgaacgccatgccttcgtcgtccagcaggtctatcttgttgagcacaataatcggctcaatctgcaaggtttcgcaggccaccaggtaacggtcgataatattgaggctcagctccggcaaaatggcggagacaatgacaatctggtcgatgttggcggcaataggttttacgccgtcgtagaaatccggacgcgtcaacacgctggtacgctcatgcaccgcttccacgatccctttgacatttacgccttccgccgccggtttacccggacgccagactacgcggtcgccggttaccaggctacggatggtacggcgaatattgcagcggtgaacgtcgccatcggcggattccacatcagcgtgcataccaaagcggctgatgacgataccttcatcaggctcgccaaacagattgtcgtcgtagtcgggcttctccttagacgttttaagacgacgctggtgattggcgttcacgcggcgctgctggcctttggagagtttatttttactcaatcgtacagactcctggtcgcccctgatgggcaaaacatctatgatacacgcaattgtggatcaatatagtcactgtgaatgggtggaaaatagcatgagtgccaatgaaaacaacctgatttggatcgatcttgagatgaccggtctggatcccgagcgcgatcgcattattgagattgccacgctggtgaccgatgccaacctgaatattctggcagaagggccgaccattgcagtacaccagtctgatgaacagctggcgctgatggatgactggaacgtgcgcacccataccgccagcgggctggtagagcgcgtgaaagcgagcacgatgggcgatcgggaagctgaactggcaacgctcgaatttttaaaacagtgggtgcctgcgggaaaaagcccgatttgcggtaacagcatcggtcaggaccgtcgtttcctgtttaaatacatgccggagctggaagcctacttccactaccgttatctcgatgtcagcaccctgaaagagctggcgcgccgctggaagccggaaattctggatggttttaccaagcaggggacgcatcaggcgatggatgatatccgtgaaagcgtggcggagctggcttactaccgcgagcattttatcaagctgtaaaatttttcctggtcacgtaagcgccggaatccacttgcggcggcgtgattttgacgctaaattgaacgtcttgctgataatttcagcacttgagataaaaacgcaaaaaaaacttttttggggggttgcagagggaaagatttctcgtataatgcgcctcccgtaacgacgcagaaatgcgaaaattacgaaagcaaaattaagtagtacgcgggaatagctcagttggtagagcacgaccttgccaaggtcggggtcgcgagttcgagtctcgtttcccgctccaaaatttgaaaagtgctgcaaagcacagaccacccaagcgggaatagctcagttggtagagcacgaccttgccaaggtcggggtcgcgagttcgagtctcgtttcccgctccaaaatttgaaagtgctgtaaggcacagaccacccaagcgggaatagctcagttggtagagcacgaccttgccaaggtcggggtcgcgagttcgagtctcgtttcccgctccaaattcttctctcaataaaatatccacagcgacgcgatgcgttattgctggtttttgttgtctctgacaaactcttgtaaacagagttatccacagcctcaggctgtaatcttaatttcaaagaaacttcgcacggtgaatagtatttttttaacctattgatagataagttaaaaattaagattccgttttgtcgagtcgatcacttgacgattttattcgtcttgaattgcaatgcgtttttatttttattcacaagctgtggatgaatcaggcgtcacgcggtaaccctttttcaatcacccgaaccagacgctgttttttcggcaattgcacttcgactatgcacgcatttcgtctctctatttgctgcgcaatcgcccacgctatgtgctcatcgagaagtgggtgctcacctttacgactttccagcgctgtcaaaatcgtttcatcccaaggggcattgcctaatgctacggcgatattacgcagccaacgcaggtgaccaatacgacgaatcgcgcttccttccgtgacttttaaaaacttctcttcgctccaggcgaataactcaatgagttccggtgcgtgtagcggcttacgcgggctgaaatcctcttctgtggtgagttgactatagcgattccacgggcagataagctggcagtcatcgcaaccgtaaatacggtttcccattaacggtcgcaactcttccgggatcgccccttcaagttcgatggtgagataagagatacagcggcgagcatcgacggtatatggctcgacgatggcaccggtcgggcaaatcgtcatacaggccacgcatttgccgcatccttcctcgactggttgatccacgggcagcggaatatcgaccagcaattcgcctaaaaagaagaagctaccggcctcgcgattgaggataagactgtgcttacctgtccagccgagcccagctttttcagctaacgggcgctcgagaataggcgcagaatcgacaaacggtctaaaattcaggctaacacaatgttgctgaatcatctcgcccagctttttgagtcggttgcgcagaagtttgtgatagtcacggcccagcgcataacggctaacatagccgagtttggggtttttcagcgtgctggcaaatgcggcgttagcaggaaggtaattcatccgcacgctgatcacgcgcagcgtaccgggcaataactcatgagggcgagcgcgcagcataccgtgacgtgccatccagtccatttcgccgtggtattgtttgtccagccatgcttgcagtttgggctcggactcgctgagatcggtatcggtaatacctacctgctgaaagcccagttccagcccccactgtttaattttttgcgctaactgattgagatcgaggggctcactcatgacggaccatacaatgaagaaaaaccccgtaagtataccacacaccgtctggtacgccgacgatatccgccgcggagaacgcgaggcggcagatgtgctggggctcacactctatgagctgatgcttcgcgctggcgaggccgcattccaggtgtgtcgtagcgcgtatcctgacgcccgccactggctggtgctgtgcggtcatggtaataacggcggcgatggctacgtggtcgcgcgactggccaaagcggtcggcattgaggtcacgttgttggcccaggagagcgacaaaccgttgccggaagaggccgcgctggcacgcgaagcatggttaaacgcgggtggcgagatccatgctagcaatattgtctggcccgaaagcgtagatctgattgttgatgcgctgctcggtaccggtttgcggcaagcgccccgcgaatccattagccagttaatcgaccacgctaattcccatcctgcgccgattgtggcggttgatatcccttccggcctgctggctgaaactggcgctacgccaggcgcggtgatcaacgccgatcacaccatcacttttattgcgctgaaaccaggcttgctcactggaaaagcgcgggatgttaccggacaactgcattttgacagtctggggctggatagttggctggcaggtcaggagacgaaaattcagcggtttagtgcagaacaactttctcactggctaaaaccgcgtcgcccgactagccataaaggcgatcacgggcggctggtaattatcggtggcgatcacggcacggcgggggctattcgtatgacgggggaagcggcgctgcgtgctggtgctggtttagtccgagtactgacccgcagtgaaaacattgcgccgctgctgactgcacgaccggaattgatggtgcatgaactgacgatggactctcttaccgaaagcctggaatgggccgatgtggtggtgattggtcccggtctgggccagcaagagtgggggaaaaaagcactgcaaaaagttgagaattttcgcaaaccgatgttgtgggatgccgatgcattgaacctgctggcaatcaatcccgataagcgtcacaatcgcgtgatcacgccgcatcctggcgaggccgcacggttgttaggctgttccgtcgctgaaattgaaagtgaccgcttacattgcgccaaacgtctggtacaacgttatggcggcgtagcggtgctgaaaggtgccggaaccgtggtcgccgcccatcctgacgctttaggcattattgatgccggaaatgcaggcatggcgagcggcggcatgggcgatgtgctctctggtattattggcgcattgcttgggcaaaaactgagcccgtatgatgcagcctgtgcaggctgtgtcgcgcacggtgcggcagctgacgtactggcggcgcgttttggaacgcgcgggatgctggcaaccgatctcttttccacgctacagcgtattgttaacccggaagtgactgataaaaaccatgatgaaagcagtaattccgctccctgaataaggaagtgactgataaaaaccatgatgaatcgagtaattccgctccctgatgagcaggcaacattagacctgggcgagcgggtagcgaaagcctgcgatggcgcaaccgtaatctatctgtatggcgatttaggcgcaggtaaaaccacctttagccggggctttttacaggctctgggtcatcagggtaatgtcaaaagccccacttatacgctggtcgaaccctatacgctcgacaacttaatggtctatcactttgatttgtaccgccttgccgatcccgaggagctggagtttatggggatccgcgattattttgccaacgatgccatctgcctggtggagtggccacaacaaggtacaggtgttcttcctgacccggatgtcgaaatacacattgattatcaggcacaaggccgtgaggcgcgcgtgagtgcggtttcctctgcgggtgaattgttgctggcgcgtttagccggttaacctttgaaaggtggcgggatgatgtatcgcatcagaaattggttggtagcgacgctgctgctgctgtgcacgccggtgggtgccgcgacgctctctgatattcaggtttctaacggtaatcaacaggcgcggataacgttgagttttattggcgatcctgattatgcgtttagccatcaaagcaaacgcaccgtggcgctcgatatcaaacaaacgggcgtgattcagggactgccgttgttgttcagcggcaataatctggtgaaggcgattcgctctggaacgcctaaagatgcacaaacgctacggctggtggtcgatcttaccgaaaacggtaaaaccgaagcggtgaagcggcagaatggcagcaattacactgtcgtctttacgattaacgccgatgtgccgccaccgcctcctccgccgcccgtggttgcgaaacgcgttgaaacgcctgcggttgtcgcaccgcgcgtcagcgaaccggcgcgcaatccgtttaaaacggaaagtaaccgcactacgggtgttatcagcagtaatacggtaacgcgtccggcagcgcgcgcgacggctaacactggcgataaaattatcatcgctattgatgccggacacggcggtcaggaccctggcgctatcggccccggtggtacgcgggagaaaaatgtcaccatcgccatcgcgcgtaaattgcgtactttgctcaatgacgatccgatgtttaaaggcgttttaacccgtgacggggattactttatcagcgtgatggggcgcagtgatgtggcacgtaagcaaaacgccaatttcctcgtgagcattcacgctgatgccgcaccgaaccgcagtgcgactggcgcttccgtatgggtgctctctaaccgtcgcgccaacagtgaaatggccagctggctggagcagcacgagaaacagagcgagctgctgggtggggcgggtgatgtgctggcgaacagtcagtctgacccctatttaagccaggcggtgctggatttacagttcggtcattcccagcgggtagggtatgatgtagcgaccagtatgatcagtcagttgcaacgcattggcgaaatacataaacgtcgaccagaacacgccagccttggcgttctgcgcagcccggatatcccaagtgtactggtcgaaaccggttttatcagcaacaacagcgaagaacgtttgctggcgagcgacgattaccaacaacagctggcagaagccatttacaaaggcctgcgcaattacttccttgcgcatccgatgcaatctgcgccgcagggtgcaacggcacaaactgccagtacggtgacgacgccagatcgcacgctgccaaactaaggacgattgatgccaattcaggtcttaccgccacaactggcgaaccagattgccgcaggtgaggtggtcgagcgacctgcgagcgtagtcaaagaactagtggaaaacagcctcgatgcaggtgcgacgcgtatcgatattgatatcgaacgcggtggggcgaaacttatccgcattcgtgataacggctgcggtatcaaaaaagatgagctggcgctggcgctggctcgtcatgccaccagtaaaatcgcctctctggacgatctcgaagccattatcagcctgggctttcgcggtgaggcgctggcgagtatcagtagcgtttcccgcctgacgctcactagtcgcaccgcagaacagcaggaagcctggcaggcctatgccgaagggcgcgatatgaacgtgacggtaaaaccggcggcgcatcctgtggggacgacgctggaggtgctggatctgttctacaacaccccggcgcggcgcaaattcctgcgcaccgagaaaaccgaatttaaccacattgatgagatcatccgccgcattgcgctggcgcgtttcgacgtcacgatcaacctgagccataacggtaaaattgtgcgtcagtaccgcgcagtgccggaaggcgggcaaaaagaacggcgcttaggcgcgatttgcggcaccgcttttcttgaacaagcgctggcgattgaatggcaacacggcgatctcacgctacgcggctgggtggccgatccaaatcacaccacgcccgcactggcagaaattcagtattgctacgtgaacggtcgcatgatgcgcgatcgcctgatcaatcacgcgatccgccaggcctgcgaagacaaactgggggccgatcagcaaccggcatttgtgttgtatctggagatcgacccacatcaggtggacgtcaacgtgcaccccgccaaacacgaagtgcgtttccatcagagccgtctggtgcatgattttatctatcagggcgtgctgagcgtgctacaacagcaactggaaacgccgctaccgctggacgatgaaccccaacctgcaccgcgttccattccggaaaaccgcgtggcggcggggcgcaatcactttgcagaaccggcagctcgtgagccggtagctccgcgctacactcctgcgccagcaagtggcagtcgtccggctgccccctggccgaatgcgcagccaggctaccagaaacagcaaggtgaagtgtatcgccagcttttgcaaacgcccgcgccgatgcaaaaattaaaagcgccggaaccgcaggaacctgcacttgcggcgaacagtcagagttttggtcgggtactgactatcgtccattccgactgtgcgttgctggagcgcgacggcaacattagtcttttatccttgccagtggcagaacgttggctgcgtcaggcacaattgacgccgggtgaagcgcccgtttgcgcccagccgctgctgattccgttgcggctaaaagtttctgccgaagaaaaaagcgcattagaaaaagcgcagtctgccctggcggaattgggtattgatttccagagtgatgcacagcatgtgaccatcagggcagtgcctttacccttacgccaacaaaatttacaaatcttgattcctgaactgataggctacctggcgaagcagtccgtattcgaacctggcaatattgcgcagtggattgcacgaaatctgatgagcgaacatgcgcagtggagtatggcacaggccataaccctgctggcggacgtggaacggttatgtccgcaacttgtgaaaacgccgccgggtggtctgttacaatctgttgatttacatccggcgataaaagccctgaaagatgagtgatatcagtaaggcgagcctgcctaaggcgatttttttgatggggccgacggcctccggtaaaacggcgttagccattgagctgcgtaaaattttaccagtagagttgataagcgttgattctgcccttatttacaaagggatggatatcgggacggcgaagccgaacgctgaagagttactcgccgcgccgcaccgattgctggatattcgcgatccgagccaggcttacagcgctgctgattttcgccgcgatgcgctggcggaaatggccgatatcaccgcggcggggcggatcccactgttagtgggcggtacgatgttgtatttcaaggcattgctggaagggttgagcccgctaccgagcgcagacccggaagtacgggccagaattgagcaacaggcggcagagcaaggttgggagagtttgcatcgtcaacttcaggaggtagatccggttgcggcagcaaggattcatccaaatgatccacaaaggctttcccgggcactggaagtttttttcattagcggtaaaactttaacggaactgacgcaaacgagtggagacgctctaccgtatcaggtgcatcagttcgccatcgccccggcgagccgtgaactgctccatcaacgcattgagcagcgttttcatcagatgttggctagtggttttgaagcagaagtccgggcgctttttgcccgaggagatttgcatacggacttgccttccattcgttgcgtgggttatcgccagatgtggtcttaccttgaaggcgaaatcagttacgatgaaatggtttatcgaggtgtttgcgccacgagacagttggcgaagcggcagataacctggctgcgtggttgggaaggggttcactggcttgacagtgaaaaaccagaacaggcgcgtgacgaagtattacaggttgttggtgctatcgcaggctgaatgtgtacaattgagacgtatcgtgcgcaattttttcagaatcgaaaggttcaaagtacaaataagcatataaggaaaagagagaatggctaaggggcaatctttacaagatccgttcctgaacgcactgcgtcgggaacgtgttccagtttctatttatttggtgaatggtattaagctgcaagggcaaatcgagtcttttgatcagttcgtgatcctgttgaaaaacacggtcagccagatggtttacaagcacgcgatttctactgttgtcccgtctcgcccggtttctcatcacagtaacaacgccggtggcggtaccagcagtaactaccatcatggtagcagcgcgcagaatacttccgcgcaacaggacagcgaagaaaccgaataaggtttcgggctgtttttttacacggggagccagcgatcctgcgttccccgctgatctatttagagggttatacgcttgtttgaccgttatgatgctggtgagcaggcggtactggtacacatctattttacgcaagacaaagatatggaagacctccaggagtttgaatctctggtctcttccgccggtgtcgaagcattgcaggtgattaccggtagccgtaaagcgccgcacccaaagtattttgtaggtgaaggtaaagcagttgaaattgcggaagctgtcaaagcgacgggtgctagcgtcgttctttttgaccatgccctgagcccggcgcaagagcgtaacctggagcgtttgtgcgagtgtcgtgttatcgaccgcaccggccttattttagatattttcgcccaacgtgcgcgtacccatgagggtaagttgcaggttgagctggcgcagctgcgccatctggctacgcgcctggtgcgtggctggacccaccttgaaagacagaaaggcgggataggtttgcgtggtccgggtgaaacccagctcgaaaccgaccgtcgtttgttgcgtaatcgcatcgtgcagatacagagccgcctggaaagagttgaaaagcagcgtgagcaggggcggcaaagccgtatcaaagccgacgttcctactgttagcctggtgggatataccaacgccggtaaatctacccttttcaatcgcatcaccgaagcgcgggtctacgcggcagaccagttgtttgccaccctcgacccgacgttgcggcgtattgacgttgcagatgtcggtgaaaccgtacttgcagataccgtagggtttattcgccacctgccgcacgatctggtggcggcatttaaagccacgttacaagagacgcggcaagccacattactgctgcacgtcattgatgcggcggatgtgcgtgtacaagaaaacatcgaagcggtgaatacggttcttgaagagatcgacgctcacgagatcccaaccctgctggtgatgaacaagatcgatatgctggaagatttcgaaccgcgtattgatcgggacgaagagaacaaaccgaaccgtgtctggctttccgcacagaccggagcggggataccacagctttttcaggctttgacggagcggctttccggcgaggtggcgcagcatacattgcgtctgccaccgcaggaagggcgtctgagaagtcgtttttatcagcttcaggcaatagaaaaagagtggatggaggaggacggcagcgtaagtctgcaagttcgtatgccgatcgttgactggcgtcgcctctgtaaacaagaaccggcgttgatcgattacctgatctaacggcgtagcgtctgaagcgtggagtcatatcctctggcgtcgaaagacaacagggatcaccgcataacaaatatggagcacaaacatggcgtggaatcagcccggtaataacggacaagaccgcgacccgtggggaagcagcaaacctggcggcaactctgagggaaatggaaacaaaggcggtcgcgatcaagggccacctgatttagatgatatcttccgcaaactgagcaaaaagctcggtggtctgggcggcggtaaaggcaccggatctggcggtggcagtagtagccaaggcccgcgcccgcagcttggcggtcgtgtcgttaccatcgcagcggcagcgattgtcattatctgggcggccagtggtttctataccattaaagaagccgaacgcggcgtggtaacacgctttggtaaattcagccatctggttgagccgggtctgaactggaaaccgacgtttatcgacgaagtcaaaccggtgaacgtggaagccgtgcgtgaactggccgcttctggtgtgatgctgacgagcgacgagaacgtagtgcgcgttgagatgaacgtgcagtaccgcgtcaccaatccggaaaaatatctgtatagcgtgaccagcccggatgacagcctgcgtcaggctaccgacagcgccctgcgtggagttatcggtaaatacaccatggaccgcattctgacggaaggtcgtaccgtgattcgtagcgatactcagcgcgaactggaagagacgattcgtccgtatgacatgggtatcacgctgctggacgtcaacttccaggctgctcgtccgccggaagaagtaaaagcggcgtttgacgatgcgattgccgcgcgtgaaaacgaacagcaatacattcgtgaagcagaagcgtataccaacgaagttcagccgcgtgcgaacggtcaggcgcaacgtatcctcgaagaggcgcgtgcgtacaaggcccagaccatcctggaagctcagggtgaagtggcgcgctttgctaaacttctgccggaatataaagccgcgccggaaattactcgcgagcgtctgtatatcgagacgatggaaaaagtgttgggtaacacccgcaaagtgctggttaacgataaaggtggcaacctgatggttctgccgttagaccagatgctgaaaggtggtaacgcccctgcggcgaagagcgataacggtgccagcaatctgctgcgtctgccgccagcctcttcctccacaaccagtggagcaagcaacacgagctccaccagtcagggcgatattatggaccaacgccgcgccaacgcgcagcgtaacgactaccagcgtcagggggaataacgatgcgtaagagtgttatcgcgattatcatcatcgtgctggtagtgctttacatgtctgtctttgtcgtcaaagaaggtgagcgcggtattacgctgcgttttggtaaggtactgcgtgacgatgacaacaaacctctggtttatgagccgggtctgcatttcaagataccgttcattgaaacggtgaaaatgctcgacgcacgtattcagaccatggacaaccaggccgaccgctttgtgaccaaagagaagaaagacctgatcgtcgactcttacatcaaatggcgcatcagcgatttcagccgttactacctggcaacgggtggtggcgacattagccaagcggaagtgctgttgaaacgtaagttctctgaccgtctgcgttctgaaattggtcgcctggacgtgaaagatatcgtcaccgattcccgtggtcgtctgaccctcgaagtacgtgacgcgctgaactccggttctgcgggtacagaagatgaagttactaccccggcggcagataacgccattgccgaagcggcagagcgcgtaacggctgagacgaagggcaaagttccggtcatcaacccgaacagtatggcggcgctgggtattgaagttgtcgatgtgcgtatcaagcagatcaacctgccgaccgaagtgtctgaagcgatctacaaccgtatgcgcgccgagcgtgaagcggtagcgcgtcgtcaccgtagtcaaggtcaggaagaagcggaaaaactgcgcgcgactgccgactatgaagtgaccagaacgctggcagaagctgagcgtcagggccgcatcatgcgtggtgaaggcgatgccgaagcagccaaactgtttgctgatgcattcagtaaagatccggacttctacgcattcatccgtagcctgcgtgcttatgagaacagcttctctggcaatcaggacgtgatggtcatgagcccggatagcgatttcttccgctacatgaagacgccgacttccgcaacgcgttaatataacgactgcggtacaggtcaataaagccaccgcatcctcagggatgtcggtggttttctttttctataaggataatgaatgaatagcacaatctggctggcgcttgccctggttttggtactggaaggtttagggccgatgctttacccgaaggcatggaagaagatgatctctgcgatgaccaatttgcccgataatattttacgtcgttttggcggtggacttgtggttgcgggcgttgtggtctactacatgttgaggaaaacgattggctgaacaaaaaacagactgatcgaggtcatttttgagtgcaaaaagtgctgtaactctgaaaaagcgatggtagaatccatttttaagcaaacggtgattttgaaaaatgggtaacaacgtcgtcgtactgggcacccaatggggtgacgaaggtaaaggtaagatcgtcgatcttctgactgaacgggctaaatatgttgtacgctaccagggcggtcacaacgcaggccatactctcgtaatcaacggtgaaaaaaccgttctccatcttattccaagtggtattctccgcgagaatgtaaccagcatcatcggtaacggtgttgtgctgtctccggccgcgctgatgaaagagatgaaagaactggaagaccgtggcatccccgttcgtgagcgtctgctgctgtctgaagcatgtccgctgatccttgattatcacgttgcgctggataacgcgcgtgagaaagcgcgtggcgcgaaagcgatcggcaccaccggtcgtggtatcgggcctgcttatgaagataaagtagcacgtcgcggtctgcgtgttggcgaccttttcgacaaagaaaccttcgctgaaaaactgaaagaagtgatggaatatcacaacttccagttggttaactactacaaagctgaagcggttgattaccagaaagttctggatgatacgatggctgttgccgacatcctgacttctatggtggttgacgtttctgacctgctcgaccaggcgcgtcagcgtggcgatttcgtcatgtttgaaggtgcgcagggtacgctgctggatatcgaccacggtacttatccgtacgtaacttcttccaacaccactgctggtggcgtggcgaccggttccggcctgggcccgcgttatgttgattacgttctgggtatcctcaaagcttactccactcgtgtaggtgcaggtccgttcccgaccgaactgtttgatgaaactggcgagttcctctgcaagcagggtaacgaattcggcgcaactacggggcgtcgtcgtcgtaccggctggctggacaccgttgccgttcgtcgtgcggtacagctgaactccctgtctggcttctgcctgactaaactggacgttctggatggcctgaaagaggttaaactctgcgtggcttaccgtatgccggatggtcgcgaagtgactaccactccgctggcagctgacgactggaaaggtgtagagccgatttacgaaaccatgccgggctggtctgaatccaccttcggcgtgaaagatcgtagcggcctgccgcaggcggcgctgaactatatcaagcgtattgaagagctgactggtgtgccgatcgatatcatctctaccggtccggatcgtactgaaaccatgattctgcgcgacccgttcgacgcgtaattctggtacgcctggcagatattttgcctgccgggcgaacagtgtgatacattgctgtgtcgggtaagccattacgctatccgacacagtgttaaatcctcgcttttttccttccccgaactgaaataaattagcgacacagcttgtggctggtttatcatcaatataaatgtattttttcccgatttcccttttgaggttgatgtgcagttaacgagtttcactgattacggattacgtgcgctgatctacatggcgagtttgccagaagggcggatgaccagtatttctgaagtgactgacgtctacggcgtctcccgtaatcatatggtcaaaataatcaatcaacttagtcgtgccggctacgtgactgctgttcgtggaaaaaatggcggcattcgcctgggtaaaccggcgagtgcgatacgtattggtgatgtggtgcgcgagctggagcccttaagcctggtgaattgcagcagtgagttttgccacattacacctgcctgtaggttgaaacaggcactttctaaggccgtgcaaagttttcttacggaactggataactacacgcttgccgatttggttgaagagaatcaaccgctttataaattattgctggtggagtgacgaaaatcttcatcagagatgacaacggaggaaccgagatgagtcaagatcctttccaggaacgcgaagctgaaaaatacgcgaatcccatccctagtcgggaatttatcctcgaacatttaaccaaacgtgaaaaaccggccagccgtgatgagctggcggtagaactgcacattgaaggcgaagagcagcttgaaggcctgcgtcgccgcctgcgcgcgatggagcgcgatggtcaactggtcttcactcgtcgtcagtgctatgcgctgccggaacgcctcgacctggtgaaaggtaccgttattggccaccgtgatggctacggctttctgcgggttgaagggcgtaaagatgatttgtatctctccagcgagcagatgaaaacctgcattcatggcgatcaggtgctggctcagccgctgggtgctgaccgtaaaggtcgtcgtgaagcgcgtattgtccgcgtactggtgccaaaaaccagccagattgttggtcgctactttaccgaagcgggcgtcggctttgtggttcctgacgacagccgtctgagcttcgatatcttaatcccgcccgatcagatcatgggcgcgcggatgggctttgtggtcgtagtcgaactgactcagcgtccgactcgccgcaccaaagcggtgggtaaaatcgtcgaagtgctgggcgacaatatgggcaccggcatggcggttgatatcgctctgcgtacccatgaaattccgtacatctggccgcaggctgttgagcaacaggttgccgggctgaaagaagaagtgccggaagaagcaaaagcgggccgtgttgatctgcgcgatttaccgctggtcaccattgatggcgaagacgcccgtgactttgacgatgcagtttactgcgagaaaaaacgcggcggcggctggcgtttatgggtcgcgattgccgacgtcagctactatgtgcgtccgagtacgccgctggacagagaagcgcgtaaccgtggcacgagcgtgtacttccctagccaggttatcccgatgctgccggaagtgctctctaacggcctgtgtagcctcaacccgcaggtagaccgcctgtgtatggtgtgcgagatgacggttagcagcaaaggccgcctgacgggctacaaattctacgaagcggtgatgagctctcacgcgcgtctgacctacaccaaagtctggcatattctgcagggcgatcaggatctgcgcgagcagtacgccccgctggttaagcatctcgaagagttgcataacctctataaagtgctggataaagcccgtgaagaacgcggtgggatcagttttgagagcgaagaagcgaagttcattttcaacgctgaacgccgtattgaacgtatcgaacagacccagcgtaacgacgcgcacaaattaattgaagagtgcatgattctggcgaatatcagcgcggcgcgtttcgttgagaaagcgaaagaaccggcactgttccgtattcacgacaagccgagcaccgaagcgattacctctttccgtagtgtgctggcggagctggggctggaactgccgggcggtaacaagccggaaccgcgtgactacgcggagctgctggagagcgttgccgatcgtcctgatgcagaaatgctgcaaaccatgctgctgcgcagcatgaaacaggcgatttacgatccagaaaaccgtggtcactttggcctggcattgcagtcctatgcgcactttactagcccgattcgtcgttatccagacctgacgctgcaccgcgccattaaatatctgctggcgaaagagcaggggcatcagggcaacaccactgaaaccggcggctaccattatagcatggaagagatgctgcaactgggtcagcactgtagcatggcggaacgtcgtgccgacgaagcaacgcgcgatgtggctgactggctgaagtgtgacttcatgctcgaccaggtaggtaacgtctttaaaggcgtaatttccagcgtcactggctttggcttcttcgtccgtctggacgacttgttcattgatggtctggtccatgtctctagcctggacaatgactactatcgctttgaccaggtagggcaacgcctgatgggggaatccagcggccagacttatcgcctgggcgatcgcgtggaagttcgcgtcgaagcggttaatatggacgagcgcaaaatcgactttagcctgatctccagcgaacgcgcaccgcgcaacgtcggtaaaacggcgcgcgagaaagcgaaaaaaggcgatgcaggtaaaaaaggcggcaagcgtcgtcaggtcggtaaaaaggtaaactttgagccagacagcgccttccgcggtgagaaaaaaacgaagccgaaagcggcgaagaaagacgcgagaaaagcgaaaaagccaagcgcgaaaacgcagaaaatagctgcagcgaccaaagcgaagcgtgcggcgaagaaaaaagtggcagagtgatcaataccctctttaaaagaagagggttagattgctgacaaaatgcgctttgttcatgccggatgcggcgtgaacgccttatccggcctacataatcacgcaaattcaatatattgcagagatcatgtaggccggataaacgtagtgcatcaggcaaaacgtaaacaacgagtacattaatgagcgaaatgatttacggcatccacgcagtgcaggccctgctggagcgcgcccctgaacgttttcaggaagtctttattttaaaaggccgtgaagataaacgtctgttaccgctgattcacgcccttgagtctcagggcgtggttatccagttggcaaaccgccaatatctcgacgagaaaagcgacggtgccgtgcatcagggcattatcgcccgcgtgaagccaggacgtcagtatcaggaaaacgatctgccggatctgatcgctagcctcgatcaaccgttcctgctgatcctcgacggcgtaaccgatccgcacaacctcggcgcgtgcctgcgtagtgcggacgccgcaggcgttcatgcggtgattgtgccgaaagatcgctccgcacagctcaacgctacggcgaaaaaagtagcctgcggcgcggcagaaagcgttccgctgattcgggtgactaaccttgcgcgcaccatgcgtatgttgcaggaagagaatatctggatcgtcggtacggcaggcgaggcggatcatacactctatcagagcaaaatgaccggacgcctggcgctggtgatgggtgcggaaggtgaaggtatgcgtcgcctgactcgtgaacattgcgatgagttgatcagcatcccgatggctggaagcgtttcttccctgaacgttagcgttgcgaccggaatttgcttatttgaagcggtgcgccagcgcagctaatttctcagaattatgaaaagccatccagatttggatggtttttttttgtctatagctggtaagataattacgtattgcaaatattcattttattaatatttaaacttaatctatatggaataatatatgacatggaatccgttggcgctagcgacggcgctgcaaactgtacctgaacaaaatattgatgtaacaaatagcgagaacgcattaattattaaaatgaatgattatggcgatttgcaaatcaatattctttttacttcccgccaaatgattatcgaaacctttatttgtccggtgagtagtatcagcaatccagatgaatttaataccttcttattaagaaatcagaagatgatgccgttgagtagcgtagggatctccagcgtacaacaggaagagtattacattgttttcggggcgttaagccttaaatcttctcttgaagatatcctgcttgagataaccagcctggtagataacgcattggatctggctgaaattacagaagaatatagtcactaattacaaggacgggtatttatgggaattttaaaaagtttatttacgctggggaaaagctttatctcccaggcggaagaatccattgaagaaacccagggcgtgcgcatgctggaacagcatattcgtgacgctaaagctgaactcgataaagccggaaaatctcgcgttgatctgctggcgcgggtgaaattaagtcacgataagctgaaagatttacgtgagcgcaaagccagtctggaagcccgtgcgctggaagcgttaagcaagaacgttaatccgagcttgattaacgaagttgctgaagaaatcgcgcgccttgagaatctcattaccgctgaagagcaagtgttgagcaatctggaagtctcccgtgatggcgtggaaaaagcagttacagcgacagcgcagcgtatcgctcagtttgagcagcaaatggaagtcgttaaagccactgaagccatgcagcgtgcacaacaggctgtaacaacctctaccgttggcgcatcttccagcgttagcacagcggcagaatccttaaaacgcctgcaaacgcgtcaggccgaacgtcaggctcgcctggatgctgccgcacagttggagaaagtcgcagacggtcgcgaccttgacgaaaagctggcggaagccggaattggcggtagcaataaaagtagcgcccaggatgtattagcaagactgcaacgccaacagggcgagtaatttttttgccagcctcgctaaaaggctggcaactattttaaggataaaatatgtctggttttttccagcgtctgtttggcaaggataataagccagctatcgctcgtggtccgctgggacttcatctcaatagtggctttacgctcgacacgttagcgtttcgtttgctggaagatgaattgctgattgcgctgccgggtgaggaatttacggtagccgccgtcagccacatcgatctgggcggcggtagtcagattttccgctactacactagtggcgatgagtttctgcaaatcaataccaccggcggcgaagatattgatgacattgatgatatcaagctctttgtctatgaagagagctacggtatcagtaaagagagtcactggcgcgaggcgatcaacgccaaagcgatgggagcaatgaccttaaactggcaggaaaaacgctggcagcgattttttaacagcgaagaaccgggaaatatcgaacccgtctacatgctggaaaaagtagaaaatcaaaaccatgccaaatgggaggtccataattttaccatgggctaccaacggcaagtaaccgaagatacttacgaatatttgctgctaaatggtgaggaatcttttaacgatctcggcgagccagagtggttatttagccgcgcgttgggtgtcgatatcccgctgacaagtcttcatattattggttaattacaaggacgtttacaatgcatatactggatagtcttcttgcctttagcgcctatttttttattggcgtggctatggtgattatttttctgtttatctattctaaaattacaccgcacaacgaatggcagttaatcaaaaacaataataccgcggcgagtctggcgttcagcggtacattgttgggttacgttatccccttatccagtgcggcaatcaatgcggtgagtattccagactatttcgcctggggcgggattgcactggtgattcagttactcgtttttgctggtgtcagactttatatgcccgcattaagcgaaaaaattattaatcacaataccgcagcaggaatgtttatgggaaccgccgcgctggctggcggtatttttaacgcagcttgtatgacatggtaatggacgatcatggccagaaaacgcaaaagtagaaataacagtaaaattggtcacggagcgattagtcgcattggtagaccgaataatccttttgaaccgtgccgcaatcgctacgcacaaaaatacttaacgttggcgctaatgggcggtgccgcttttttcgtattgaaaggttgtagcgatagtagcgatgtcgataacgacggcgacggaacgttttacgcgacagtgcaggattgtattgatgacggtaataatgccgacatttgcgcgcgtggctggaacaacgccaaaacggcattttatgccgatgttccgaagaatatgactcagcagaactgtcagtctaagtacgaaaattgctactacgacaatgttgaacagagttggatcccggtcgtttctggatttttgttaagccgggttattcgtaaagatcgcgatgagccgtttgtttataacagcggcggttcctcttttgctagccgcccagtctggcgcagcacttctggtgattactcctggcgctccggttctggcaaaaaagagtcttactctagcggcggctttaccaccaaaaaagcgtctaccgtttctcgcggcggctatggtcgttcttccagcgcccgtgggcattggggaggctaatcatgctgagacacaacgttcctgtgcgacgggatctggaccagatcgccgctgacaacggtttcgactttcatatcatcgacaatgaaatctattgggatgagagtcgggcttaccgttttactctgcgccagattgaagagcagatcgaaaaaccgactgcggaactgcatcagatgtgccttgaggtggtggatcgcgcggtaaaagatgaagagatcctgacgcaactggcgatcccgccgttgtactgggatgtgatcgctgaaagctggcgcgcccgcgatcctagcctgtatggacggatggattttgcctggtgtggcaatgcgccggtgaagctgctggagtacaacgccgatacgccaactagtttgtacgagagcgcttatttccagtggctgtggctggaggatgcccggcgcagcggcattattccgcgtgatgccgatcagtacaatgctattcaggaacgcctgattagtcgctttagcgagctttacagtcgggaaccgttttatttttgctgctgtcaggacaccgatgaagacaggagtaccgtgctgtacttgcaggactgcgcccagcaggcagggcaggagagccggtttatctacattgaagatctcggtttgggcgtcggcggcgtactgaccgatcttgatgataatgtcatccagcgtgcatttaagctgtatccgctggagtggatgatgcgtgacgataacggtccgctgctgcgcaagcgtcgcgagcaatgggtggagccgttatggaaaagtatcttgagtaataaagggctaatgccgctgctttggcgcttcttccctggtcatcctaatcttcttgcgtcctggttcgatggcgagaaaccgcagattgccgctggcgaaagctatgtgcgtaaaccaatctatagccgcgaaggcggcaacgtcaccatttttgacggcaagaataacgttgttgaccacgctgatggtgattacgccgatgaaccgatgatctaccaggcgtttcaacctctgccgcggtttggcgatagctacacactcatcggtagctggattgtcgatgatgaagcgtgcggaatggggatccgtgaagataacacactgatcaccaaagacaccagtcgtttcgttccgcattacattgctggataagaatgttttagcaatctctttctgtcatgaatccatggcagtgaccatactaatggtgactgccattgatggagggagacacagtgcactggcaaactcacaccgtttttaatcaacctataccattaaataacagcaacttatacctgtctgatggcgcgctctgcgaagcggtaacgcgtgaaggtgctggctgggatagcgattttctagccagtattggtcagcagttaggaacggctgaatcccttgaactggggcggctggcgaatgtgaatccgcctgaattattgcgctacgatgcgcaaggacgccgtctggacgatgtgcgttttcaccccgcctggcacctgctgatgcaggcgctatgtaccaatcgggtgcacaatcttgcctgggaagaagacgctcgctccggcgcatttgtggcgcgcgcggcgcgttttatgttacatgcgcaggttgaggcagggagcttatgtccgataaccatgacctttgccgccacgccattgttgttacagatgttacccgcgccgtttcaggactggaccacgccgctattgagcgatcgctacgattctcacttattgccaggtgggcaaaaacgcggtttgttgattggcatgggaatgacggaaaagcagggcggttccgatgttatgagcaacaccacccgtgcagagcgtctggaagatggctcttatcggctggtggggcataaatggtttttcagcgttccgcaaagcgatgcgcatctggtgctggcgcagaccgcgggtggtctgtcctgcttttttgtgccgcgctttttgcctgacgggcaacgcaacgcgattcgcctcgagcggctgaaagataagctgggtaatcgctctaacgccagttgcgaagtggagtttcaggatgccattggttggttgttggggctggaaggggaaggaattcgtctgatcctgaaaatgggtgggatgacgcgttttgattgcgccctgggtagccatgccatgatgcgccgtgcatttagcctggcgatttatcatgcacatcaacgccatgtttttggtaatccattgatccaacagccccttatgcgtcatgtcttaagtcgcatggcacttcagcttgaagggcaaacggcgttgctgtttcgtcttgcgcgagcgtgggaccggcgtgccgatgccaaagaagccctgtgggcgcgtttatttacgcctgcggcaaaatttgtgatctgcaaaagaggtatgccgtttgtggccgaagcgatggaggtgctgggcggcattggttattgcgaggagagtgagctgccgcggctttaccgggagatgccggtaaacagtatttgggaaggttccggcaatattatgtgcctggatgtgttgcgcgttctcaataagcaagcgggcgtatacgacttattgagcgaagcatttgtggaagtgaaagggcaggatcgctattttgatcgcgcggttcgtcgtttacagcagcagctgcgtaagccagctgaagaactggggcgagagattactcatcagctattcctgctgggctgcggtgcgcaaatgttgaaatatgcttctccgccaatggcgcaggcgtggtgtcaggtgatgttagatacgcgcggcggcgtacggttgagtgagcagatccagaatgatttattgctgcgggcgacggggggagtgtgtgtgtaagcgtatacgactgatgcgacgctggtttcgattaactaaatgaaatatgtgaaaattgtaggccggacaaggcgctcgcgccgcatccggcattgttcatttgctgtagatgacactcatgcatacagtatcgcctgtacgcgccagttatcaggctgctggtcttcgtacatggtaataatgcggtaccaactcgcaccttgttcatcggcctttaacgccacgatacgttccacgtcctgcggatccccactaatattgctaacactgatctgacctatttcattcaggcccgtcacgcagtcagcactggcgaattctgcagactgtgccgtggcgctcgcaggataagtcactaattgcaggctgggactggcaagtaattgtttcatcgtcagctccatttttcgtttccccacatgttgcagggcattccatcgcggtaataaacgcccaggcttccagccggtaatttattgtgcacaggtaaacgcatagggacgcaaagcaatgtaaagctgactatgtaagttgtctgatttatttacggtacaaaatggcttgactataccactgtcctgtcacgatggtttcgtccaccatgacgacaacgtaataatcagcttttgcagcgacagctttcgctttgatttctgctaatgcgtcatccggagaaccccgaaccatcgtgcttacgctacctattcgctgtaacccttgcgtctggtcgcggcgaatctcttgcggatggtccgttactggcggtgctggctgtggcgtaccttgcagtgcgctacaggcacttaacatcaacaccaataataaactggcaaaccggtaaataacgctattacgtttcctgctaaccatagtgtagtgccttattaatttaactttgggggaatgttcccgaattgttacctggtacgcgattttcgaatgaaaacgtgacgaaagcgtaacccacatctcaacattatgaactaataccgccagcagaaacttgtgctaaggatttcttcatgtcataccagacaaaaaggagagacagatgattgaaatagaaagtcgcgagctggcagatattcccgttcttcatgcttatcctgtcgggcaaaaagataccccgttaccgtgcgtaattttttatcacggctttactagttccagtctggtgtatagctattttgccgttgcgctggcgcaggctggtttgcgggtgatcatgccggatgcgcccgatcacggtagccgttttagtggtgacgcagcgcggcggttaaatcaattctggcaaatcttgctacaaagtatgcaggaattcactactttacgtgcggcaatagccgaagaaaactggctgcttgatgaccgtctggcagtcggtggcgcgagcatgggcgcgatgacggcactggggattaccgctcgccaccccacggtgagatgtaccgccagcatgatgggaagcggctattttacaagtctcgcccgtagtctgtttccaccgctgatacctgaaacggcagcacagcagaatgaattcaataacattgtcgcgccactggcagagtgggaagcgacaaaccacctggaacaacttagtgacagacctctactgctgtggcatggcctcgacgatgacgttgtgcctgccgacgaaagtctacgtttgcagcaggccttaagcgagacgggacgggataaactgctaacctgtagttggcagccaggcgtgcgtcaccgcattacgcctgaggcgttagatgctgccgtgacatttttccgccagcatctttaaacacgcagaatgctgaccccttgcgcttccagttgttgcaggatttccgggttagcatttttgccggtgataagcatatcgatttgatcggcacggctaaaaagcattcccgcgcgttcgccaatcttactgctatcaaccagtaccaccagtttccctaccacgctcagcatcttctgctctgccattgctgtcagcatatcggttttatacaacccttctgcggtcagcccttttccgctggtaaacatccagtgcccggcatagagactgttttcgctgccctgcgggcttaaagtgatggactgacttttgttgtactgtccgcccataatgatcacgctgtcatgttcttgatcgatcaggtaatttgccagcggtagataattagtgatgatttgcactggcttgccacacatttcccgcccaagcagaaacgcggtggagccgcagttgatgactacgctttcgcccggattaaccagctggctggccgctttagcgatacgtactttttcatcgtgattctgcgcctgatgcagattcatcggcgtccagcgcgggcgctgttgggtaatagcttctgcgccattgcgcacttttttcagtttgccgctttcgtcaagtttattgatatcgcgtcgcgcagtggcagggctaattcccagacgctcaacgactttctcaacggtcacaaagcccaattgtgcgagcatttccaggaggatttgatgtctttgtgcttcagtcatgagctattccgataaaatttgatttttttagatgatatttgaaatagccaggaaatactacgccggatagcgcgaacttctccacgctacccggtataaacgacagattacaggaaactcttgaacggcagatccggttcaatagtgaagcaatcatcgaaaccgcgcggatagtggtactcgaagttgtctttatccagcggccaggtaaatttgccacccacctgccagataaacggcttgaagccatacttcaggcgatcttttttcatctcccacagcacgcggatctcttgcggatcggcctggaagttactccagatatcgtggtggaacgggatcactactttcgcattcagcgcttcacccatacgcagcatatcggcgctggtcattttgtcggtgataccgcgcgggttttcgccgtagcttcctaacgccacgtcgatctgatgttcgttaccgtgcttcgcataatagttagagtagtgggagtcgccgctgtgatacagggagccgccaggcgttttgaacaggtagttcaccgcgcgatcgtccatgccatctggcagtacgccagccgctttttgatcggcaggcagggtgatcagtgcagtacggtcgaaagcatcaagcgcatgaatttcaatgtctttcacttttactacatcgcccggtttgaccacgatgcaacgctctttcggtacgccccagccaatccacaaatccacacaggttttcggtccgataaacggtacgtcatctgcacaattctgcatcacggcagcagcgacgttaacgtcgatatgatcgttgtgatcgtgagtcgccagtaccgcgtcgatctggcgaatcgcaaacggatcaagaacaaacggggtggtacgcaggtttggctgcagttttttcacgccagccatgcgctgcatctggtgaccctgtttcattaacgggttaccgtgactttgtttgccagtgccgcaccagaaatcaacgcaaacgttggtgccaccttcgcttttcaaccagatcccggtgcagccaagccaccacatcgcaaatgtgccaggagcgacctgttcttgttcaatttcttcattcaaccagctaccccactccgggaaagtgctcaggatccaggattcacgggtgatacttttcactttactcatcgccatttaccttcatgatagttcaattcgaatcaatatgtgattggttttgattaatcctgacactattttttcaggaaggcaatgaccattttttgactttttgccagggaagttgttgttgattttgagtatggaaagatttaatggaatgtgtaattcaattaactaaatgaatttaaatggataattgtttcgttgtgtgaatcccactctatccatgtggaattatttgcgggtcgcgtcacatttaatcataaataatcttgttgtgattacttttgaaaattagagtgagtgcacaacattccgggtgtgtggaatacccggttacctcttcttcaggagatcgttatggagatcctctacaacatctttaccgtgttttttaaccaggtcatgaccaatgccccgttgttgctgggtattgtgacctgtctgggctacatcctactgcgcaaaagtgtcagcgttattattaaaggcacgattaaaaccataattggtttcatgttgttgcaggcagggtccggcatcctcaccagcaccttcaaaccggtggtggcgaaaatgtccgaagtctacggcattaacggcgcaatttccgatacctacgctagtatgatggcaaccatcgaccgcatgggcgatgcctatagctgggtgggttacgccgtattgttagcgctggcgctgaacatctgttacgtgctgttgcgtcgcattaccggcattcgcacaatcatgttgaccggccacatcatgttccagcaggccgggttgattgccgttacgctgtttatcttcggctactccatgtggaccaccattatctgtaccgcgattctggttagcctctactggggcatcacttccaacatgatgtacaagccgactcaggaagtgacggatggctgtggtttctccatcggtcaccagcagcagtttgcaagttggattgcctataaagtcgcgccgttcctcggcaaaaaagaggagagcgttgaagacctcaaattgccgggctggctgaacattttccacgacaacatcgtctccacggcgattgtgatgaccatcttctttggtgccattctgctctccttcggtatcgacaccgtgcaggcgatggcaggcaaagtgcactggacggtgtacatcctgcaaactggtttctcctttgcggtggcgatcttcatcatcacgcagggtgtgcgcatgtttgtggcggaactctctgaagcatttaacggcatttcccagcgcctgatcccaggtgcggttctggcgattgactgtgcagctatctatagcttcgcgccgaacgccgtggtctggggctttatgtggggcaccatcggtcagctgattgcggttggcatcctggtcgcctgcggctccagcatcctgattattcctggctttatcccgatgttcttctctaacgccaccatcggcgtgttcgctaaccacttcggcggctggcgtgcggcgctgaagatttgtctggtgatggggatgatcgaaatctttggttgcgtctgggcggtgaaactcaccggtatgagtgcctggatgggcatggcggactggagcattctggcaccgccgatgatgcaaggcttcttctccatcggtatcgcctttatggccgtcatcattgtaattgcactggcttatatgttcttcgctggccgcgcgctgcgcgcagaagaagatgcagaaaaacaactggcagaacagtctgcttaataaggagttttgattatgaccgtacgtattctggctgtgtgtggcaacggacaaggcagttccatgatcatgaagatgaaagtggaccagtttttaacccaaagtaacattgaccatacggtaaacagctgcgcggttggcgagtacaaaagcgagttgagtggcgcggatatcatcatcgcttctacgcacattgcgggcgaaatcaccgtgaccggcaacaaatacgtggttggcgtgcgcaacatgctctctcctgccgactttggcccgaaactgctggaagtgatcaaagagcatttcccgcaggatgtgaagtaaggacgcgccatgaaattacgtgatagcctggcggaaaataaatccatccgcctgcaggctgaagcagagacatggcaggaagcggtgaaaatcggcgttgacctgctggtggcggcagatgtggtagagccgcgttactaccaggcgattctggatggcgttgaacagttcggtccttatttcgttatcgctccgggcctggcaatgccgcacgggcgtccggaagagggcgttaagaaaaccggtttctctctggtaacgctgaaaaagccgctggagttcaaccacgatgacaacgatccggtggatatcctcatcaccatggcggcggtcgatgccaatactcaccaggaagtgggcatcatgcagatcgtcaacctgtttgaagatgaagagaattttgaccgtttacgcgcctgccgtaccgagcaggaagtactggatctcattgaccgcaccaacgcggcagcttaagaaggaattgaacatgagtttaccgatgttgcaagtcgcgctggacaaccagactatggatagcgcctacgaaaccactcgcctgattgccgaagaagtcgacattatcgaagtgggcaccattctgtgcgtgggcgaaggcgtgcgtgcggttcgtgacctgaaagcgctctacccgcacaaaatcgtactggcagacgccaaaattgccgatgcaggcaaaatccttagccgtatgtgcttcgaagccaacgctgactgggtgacggtaatttgctgtgcggatatcaacaccgccaaaggcgcgctggacgtggcaaaagagtttaacggcgacgtgcagatcgaactgaccggttactggacctgggaacaggcgcaacagtggcgcgatgcaggcattgggcaggtggtttatcaccgcagccgtgacgcgcaggccgcaggcgtggcgtggggcgaagcggacatcaccgcgatcaaacgtctttccgatatgggcttcaaagtcaccgtcaccggaggcctggcgctggaagatctgccgctgttcaagggtattccgattcacgtctttatcgcgggccgtagtatccgtgatgccgcttctccggtggaagccgcacgtcagttcaaacgttccatcgctgaactgtggggctaaggagcggatatgttgtccaaacaaatcccgcttggcatctatgaaaaagcgctccccgccggggagtgctggctggaacgcctgcaactggcaaaaacgttaggcttcgattttgtcgaaatgagcgtagatgaaactgacgatcgcctgagccgcctcaactggagccgcgagcagcgtctggcgctggtcaatgcgattgttgaaaccggcgtgcgcgtgccgtccatgtgcctttctgctcatcgtcgtttcccgctgggcagtgaagatgacgcggtgcgggcgcaggggctggagattatgcgtaaagctatccagttcgcccaggatgtcggtattcgcgtgatccagctggcgggctatgacgtttactatcaggaagccaataacgaaacgcgtcgtcgtttccgtgacggcctgaaagagagcgttgagatggcaagccgcgcgcaggtgacgctggcgatggagatcatggattatccgttgatgagctccatcagcaaggcgctgggatacgcgcactatctcaacaatccgtggttccagctctacccggatatcggcaacctgagcgcgtgggacaacgatgtgcagatggagttgcaggccggaatcgggcatatcgtcgcggtacatgtgaaagacaccaaacctggcgtcttcaaaaacgtgccgtttggcgaaggtgtagtggatttcgaacgttgtttcgaaacgctcaaacagagtggctattgcgggccgtacctgattgagatgtggagcgaaacggcggaagacccggcggcagaagtggcgaaagcgcgtgattgggtgaaagcgcgcatggcgaaagcgggcatggtggaggcggcataatgcaaaagctaaaacagcaggtatttgaagccaacatggagctgccgcgctacgggctggtgacctttacctggggcaacgtcagcgctatcgaccgcgaacgcgggctggtggtgatcaagcccagcggcgttgcctacgaaaccatgaaagcggccgatatggtggtggttgatatgagcggcaaggtggtggaaggggagtatcgcccatcttccgacactgcgacgcatctcgaactctaccgtcgttacccgagccttggtggcattgtccatacccactccactcatgccaccgcatgggcgcaggcggggctggcgatcccggcgttaggcaccacgcacgccgactacttctttggcgacattccgtgtacgcgcgggttaagcgaagaagaggtgcagggcgagtatgaactgaacaccggcaaagtgattatcgaaacgctgggcaacgccgagccgctgcatacgccgggaattgtggtgtatcagcacgggccgttcgcctgggggaaagatgctcacgatgcggtgcataacgcggtggtgatggaagaagtggcgaaaatggcgtggattgcccgcggcattaacccacaactcaatcacatcgacagcttcctgatgaataaacacttcatgcgtaaacacggtcctaacgcttattacgggcagaagtaaaacacgcgctgcggaaatttccttcctcgggagataactggtctaattccgcagccgtttttcaaaaaaaagccccctgcgaagggggcaaagcaaactatggcaatgtttcgttggttatacctggtgttagcgataaatatccgcgctggcgtgcatattgccgttactccccggttcccgcatcagaattacgtggtagtacgttgcgccttgcgcatctgtttcttcatttaatgcctgacgtgcttcgctttcagtggcgaaattatgattgatataaatcacgcctaagctttgcacatcgtccatatttctggcctggtggttattaatttcaatggctgcccatgtatttgcacttagcaaaagcacagccagaagggctaaaacacgactgaacatagatacctcctcgacggctgactttgtgtgctctcctctgtgatgatcttctgatttaattttaatcaatgataaagaagttgatggtgaccatttctgatgcagttgttcaaaaaaacaccatgatgaagtgtgatgaacttcaaatcagcgtgttagaggttaattgcgaaaggggagatttatttcggctctgcccttgagtttagcgaggcatacaagtactataacgcgtcatttttcagccgacctttaacacgttccttgcctccccgggattcggctgacccagacaggaggctgaataatccgtaaggagcaattcgatgcgtcattacgaaatcgtttttatggtccatcctgaccagagcgaacaggttccgggcatgatcgagcgctacactgctgccatcactggtgcagaaggcaagatccaccgtctggaagactggggccgccgtcagctggcttacccgatcaacaaactgcacaaagcacactacgttctgatgaatgttgaagctccgcaggaagtgatcgatgagctggaaactaccttccgcttcaacgatgccgttatccgcagcatggttatgcgtaccaagcacgctgttaccgaagcatctccgatggttaaagcgaaagacgagcgccgtgagcgtcgcgatgatttcgcaaacgaaaccgctgatgatgctgaagctggggattctgaagagtaatttctgatgaccaaccgtctggtgttgtccggcaccgtgtgcagggctccccttcgaaaggtcagtccaagtggaattcctcactgccagttcgtgcttgagcatcgttctgtgcaggaggaagccggctttcaccggcaggcgtggtgtcaaatgcccgttattgttagcggacacgaaaaccaggccattactcacagtataacggtcggcagtcgcataaccgttcaggggttcattagttgccacaaggcaaagaacggactgagcaaaatggttttgcatgccgagcagattgaattgatagattctggagactaaccatatggcacgttatttccgtcgtcgcaagttctgccgtttcaccgcggaaggcgttcaagagatcgactataaagatatcgctacgctgaaaaactacatcaccgaaagcggtaagattgtcccaagccgtatcaccggtacccgtgcaaaataccagcgtcagctggctcgcgctatcaaacgcgctcgctacctgtccctgctgccgtacactgatcgccatcagtaatcggtcacggtccattaatacgactttgagaggataaggtaatgcaagttattctgcttgataaagtagcaaacctgggtagcctgggtgatcaggtaaacgttaaagcgggctatgctcgtaacttcctggtaccgcagggtaaagctgttccagctaccaagaaaaacattgaattcttcgaagctcgtcgcgctgaactggaagctaaactggctgaagttctggcagctgctaatgctcgcgctgagaaaatcaatgcactggaaactgttaccatcgcgtctaaagctggcgacgaaggtaaactgttcggttccatcggtactcgcgacatcgctgacgctgtaactgcagctggcgttgaagtggctaagagcgaagttcgtctgccgaacggcgttctgcgtaccactggcgaacacgaagtgagcttccaggttcacagcgaagtattcgcgaaagtgatcgtaaacgtagtagctgaataattcgttattcaacgagacgtaaaaacgccgaccattggtcggcgttttgctttctatttttcgtcaggtattagtttcgcaagtagatccattcaccattctcttgtgtccataagtcaggatggtttgctggcgttagatacatacgagcgcaactgatgtctcgctcctgcggcactcgctcgaaacccaaaccgctgtagattgcggcactactacttaaggaacgcagaccaattttcaaatcatggggtaaatcagaatacgcgtttagcaatgcagcaatgatgaatccgagggcattagaaacgcctgtaacagtgcgaagttggtcgatataaagatcgattgttggtagttcagaactccagcaattaggcatttgggcaggaagggttacaacgtatcctatcgtttggccggtatagtctggagtaccataaccaggtcccaaaaccacttcgtgtattgtgtatttactgttgggttcgaaggattcgacatcttgcaataaatatttcagttctgcggttaacctcgcacccgcgtaagctttattgtatttctgggcgtgaatattatctaatgtagcttcatggttccatccaaaagaattatcaccattcattgtgattccatcgtaagcattacacctcgtcgctaacttattgaatgcttgccagtcactgagatctagtttgtggatctcaacagtacgtctgccatcgcaattatgatctcttccacgattactaagtaatgtagcgcgtgcgtattgatgaaattttaattttactggtttgtcggtggagctaaaacgagataaatatgcaggaaaactataaatagtcgttggtaatgtcattgtaatgttacctgtttaatgtttttataaatatcgcagctgaatgttcacagaaaaaaatcgatattaataaaaataagtttgttttctgaagtggtgaaaatagcggatggtgaaagatattaatatcaaaaatcgctcattatggatataacgatgcacccggggagaaaatgacttccacgccttacaccgtacattcttgttgtgcggtatgtaattattctacgctgtcggtatcggtgtattcgttaatcagcaggttagccagccacaaaaagccattgagaaaattattgattttacatgggattattatattgctaatccttggtttttaaaaattgtgcatagtgaaaatcaaagtaaaggtgtgcattatgcaaaaagtcagcgtctcttagaaattaaccatgcgcacttgcagttaatggaatccttattggatgaagggaagaaacacaatatttttaagccagatatcgacccattgcaggtgaatattaatattgctgcgcttggcggatattatttgatcaaccagcatacgcttggcctggtttatcacatcagtatggttagtccccaggcactggaagccagacgtaaggtcatcaaagagacaatccttagctggcttttggttgaccctagttctaccgcgcacgaataattaccgcgcacgaataaaactgccatccggctggcgggtgaacaggacctgttgattattccccgtatcaatggttaagcccgtcaccacgccgctggcgttctggcggattttcaccatctgcccgttttgcaaattactcagcggcttacccgcgccttctacctgcgccattgcatagacatcggtagcgggcagtccgtggtcgcggaacagctgcgccatcgttttaccgggttcgacacggtaagagcgccattgattatcaattccgctatctggctggaatggttgcgtttgggtagtttgcggctgctcttctggctggccttcctgtataggttctggagcgaccggagccacctgatcaggaccattttgtggggtaactaattgcgcccgcagctgttcttctgtcggcggttgactttggctctgaatatctaactgcgcttcacgcgtcaccaccggcgcgttgggcgtatcatcagatggaagcagaaatccgaccaccaatacaatggcggcaataatgatcccccgacgatgcatcggcggcagcgggtccatgaagcgaaaattgtccggcgcgtgccagactttctccagggttggttttagttcaaagcgcccgggcatggtttcctcctgctccgcgtcttgttcctcaatcatagcctatgaataagctaacgctatgatgtccgtggtaaacccgcctttattatattcatacgggatattgctattgtttctttttccctgggatttgtcatcattcccgcgacaaagttttacccaaagaagtgtggctgatatgctgcccgctactttataccctaagaaaggaaatacgatgaccaccccaacttttgacaccatcgaagcgcaagcaagctacggcattggtttgcaggtagggcaacaactgagtgaatctggcctggaagggctgctgccagaagcactggttgcaggtattgccgatgcgctggaaggcaaacatccggctgttccggttgatgtggtgcatcgcgcgctgcgtgaaatccacgagcgcgccgatgccgttcgtcgtcagcgtttccaggcgatggctgctgaaggtgtgaaatacctggaagaaaacgccaaaaaagaaggtgtgaatagcaccgaatctggcctgcaattccgcgtgatcaaccagggtgaaggcgcaattccggcacgtaccgaccgcgttcgtgttcattacaccggtaaactgatcgacggcaccgtgtttgacagctccgttgctcgtggtgaacccgctgaattcccggttaatggcgtgatccctggctggattgaagcactgactctgatgccggtaggttctaaatgggaactgactatcccgcaggaactggcatatggcgagcgcggcgcaggcgcatccatccctccgttcagcaccctggtgtttgaagtcgaactgctggaaatcctctaagcagcgcattctgttcccctcgaacgagaggggagcaggcattcagcaataaacccttcagtttgccaaacggcgctattttgtgttgcaaagaccccgtaagcgtgtatttttgtgagctgtttcgcgttatcaccgtgatatgacactcactttaaacataaaattaacattagatctaaatcttagtattcatcccgcgtattgttacctaatatcgatgagtcccgatacagattcgtcgtatcatagactgactaaaggccgtagagcctgaacaacacagacaggtacaggaagaaaaaaacatggtagatcaggtaaaagtcgttgccgatgatcaggctccggctgaacagagcctacggcgcaatctcacaaaccgacatattcagcttattgccattggcggtgccattggtacggggttgtttatggggtctggcaaaacgattagccttgccgggccgagcatcattttcgtttatatgatcattggttttatgctctttttcgtgatgcgggcaatgggggaattgctgcttagcaatctggaatacaaatcttttagtgacttcgcttccgatttactcgggccgtgggcaggatatttcaccggctggacttactggttctgctgggttgtaaccggtatggcagacgtggtggcgatcacggcttatgctcagttctggttccccgatctctccgactgggtcgccagcctggcggtgatagtgctgctgctgacgctcaatctcgccaccgtgaaaatgttcggtgagatggagttctggtttgcgatgatcaaaatcgtcgccattgtgagcctgattgtcgtcggcctggtcatggtggcgatgcactttcagagtccgactggtgtggaagcgagtttcgcgcatttgtggaatgacggcggctggttcccgaaaggtttaagtggcttctttgccggattccagatagcggttttcgctttcgtggggattgagctggtaggtacaacagctgcggaaaccaaagatccagagaaaagtctgccacgcgcgattaactccattccgatccgtatcattatgttctacgtcttcgcgctgattgtgattatgtccgtgacgccgtggagtagcgtagtcccggagaaaagcccgtttgttgaactgttcgtgttggtagggctgcctgctgccgcaagcgtgatcaactttgtggtgctgacctctgcggcgtcttccgctaacagcggcgtcttctctaccagccgtatgctgtttggtctggcgcaggaaggtgtggcaccgaaagcgttcgctaaactttctaagcgcgcagtacccgcgaaagggctgacgttcagctgtatctgtctgctcggcggcgtggtgatgttgtatgtgaatcctagtgtgattggcgcgttcacgatgattacaaccgtttccgcgattctgtttatgttcgtctggacgattatcctttgcagctaccttgtgtatcgcaaacagcgtcctcatctacatgagaagagcatctacaagatgccgctcggcaagctgatgtgctgggtatgtatggcgttctttgtgttcgtggtcgtgttgctgacactggaagatgacactcgccaggcgctgctggttaccccgctgtggtttatcgcgctggggttgggctggctgtttattggtaagaagcgggctgctgaactgcggaaataaccgcattatcatgctggatggcgcaatgccatccagcttttagatcactcacccgccagcgcgcgtgggaacagtacattgttttccagactgatgtgatccatcaggtcatcaatcagttcattaatgccgttatacatcgctttccaggtggtgcaggcttctggcggcggtgtgacgttattggtggtgtgtttaatcacttccagcagttcgcccgcttcatcgtgctcgctttccattacgctgattggccccattgcctggctgcccatgccttgtttgatcatcgggaagaggatctgctcttctttcatcatgtggctggaaagctcttcatgcagcatggtcaggtattttgtcagcccttttggcacgctcggtttgtcggcgtgaacgcgctcgactttagtcgcttgcagaatcagctccggcagttgctcgcggtgacgatcgtggtagcgcacgatgatatggtcgatgatttctgccagcggggcgctacgccagtctttctcaatcggttgttcagcgagctttgccagttcagcttcaatgacctcaacatccagttctttacgtgccgccgcgcgcgccagcgtctgcttaccgccacagcagtaatccatatcatatttacgaaacagagcactagcgcgaggaatagagagcgccagttcacctaaaggttggtcgcgataagccatagctgatacctcattcttaataagataagatgtattttaaatgcatctttaaggcaaaagctataacccttacgtagcagaggcttatttaactcactgccagcgtgtcaactttcactgacagattcagttaaaggtttttctggttttgctctgaccgcgatgaccacgccaatcactaacagcgcgataccgctcagcgtcattagcggcggcatttgctggcggagtaaaaaggtgtacagcaaacctgccagcgtttcgaaaacaatcagcggcccgagaatcactgtcggtaatagctggctggcgacgttccagcagagtgcgccaacccaactgcaaagcacggctatcgcaaccatcagactaataaacaccagcggacgggggccaaagggtagggagaagtccggcgtttgcgtattcagccagtaacaagcgacgagatagccgataagactaaccggcagtgtgaccagcgcctgcgctgttgcccacatcatcggatgtttgtcgggattttcccgcagccagcgggcgttgcgcagggcataccacgcccagcagaccacggaaactaacgccagcacgatgccagaggtataacgtgcccagtcaaaatcggggagtccgtggtttaactcagcaatattcacacacgccaggccgatgccaatacaaatcagtgctggggcgagttttccccacgcgagtttgccgtcgcgctggctataaagcagattggcaaagacaggaatgaccaccggcagggtgccgataatcatcgtggaaacaggcgcgccagtacgttgaatggcactggcaaggcagaagtaatagatgaggttgcccatcatagtgagcatcaaggcggtaagccagtcgcgacgcgccaactgacgcagacgcacgcgtcccagccaggcaatgggcagcgcaattaaccctaacgccagataacgccccatgctctgcaacatcgccgggtattccggcacgatcaacggcccgacaaaaataagcccccacatcaaccctgctaacagggcgtacagcacgccgctaatcattactggcatccattgatctgtcagaagaaagttcaggaagcagacatgattgctcccggcatcccgtcattatcagagaggatgcgggaggatgccactttaattaattagttattaacattaaaaagatggcttacgctttcggctaacgttgtcgttgggtggccaatcaatttgctaagtgttttgctgtcatcaaacagaccgcctttgcttgcgccaacgtcagaatccgccagcatatccgccagtccgtcgggcagtccgacgcttttcagtgccgcggcgaaatcggcttcgctcagattttgataggtaacctgtttgccgctctgtttggtcagctctgccgctaactgtgtcaacgtccaggcactatcgcccgccagttcgtaaaccttgccttcgtgaccggcttcgctaatcacgcgtgccgcagctgccgcataatctgcccgcgttgcactggcgattttgccatcgcccgccgcaccgataaatacgccgtgttccagtgctgccggggcgctggcgaggtagttttcgctgtaccagccgttgcgcagcagggtgtaaacgatgccagaatcagccagcattttctccgtctcgatgtgctcatcggcgaggccgagcggggaggtatctgcatgtagcaggctggtataagcgataaatttcacgccagccgcctttgcggcattaataacattacgatgctgcggggcacgttgacccacttcgctggaagagatcagcagtagtttttccactccctgaagtgcagatgtcagtgcggcttcatcgccgtagtcagcctgacgcacggtaatgccttgtgctgccagggcttgggcttttgccggattacgaacgatagccactatttggctggcaggaaccgttttcatcaaggattcaataacatagtgaccaagttggccagtggcaccagtaatagcgatcatgggaagtctccatcgttttgtcttgtgtttaaatacgctaacacctaaacttacttttagtaagtacgtacaaaaaggtaagtatgaaatgagtcaggttagcctgagccaacaactgaaagagggtaatctctttgcggaacagtgcccgagccgcgaggtgttgaaacacgtcaccagccgttggggggtgttgattctggtggcgctacgcgaaggtactcatcgctttagcgacctgcggcgcaaaatcggtggggtgagtgaaaagatgcttgcgcagagcttacaggcgttagaacaggatggttttcttaaccgtatcgcgtatccggtggtgccgccgcatgtggaatatagcctcacgccgctgggcgagcaggtgagcgaaaaggttgctgcactggcggactggattgagttgaatttgcccgaggtgttggcggtgcgggatgaacgtgcggcataactgccggatgcgctgagcttatctggtctacggtgcatggcttgtagggcggataagatgcgccagcatcgcatccgccaataaatgccggatgcggttgatgatttataggccgaaaaagaagtgttttacttactcaaatccacctgataaatcgcaaacccgatatcatcggtcgcgactttattcatcggatactgccctttctctttaataaacgctgcggctttatcactcggagaggtttcgaaacggatatccagtttcttatcgccagctatcggtgctaaacgccagttgttatctgccgccgggtgaatttcccccgcacgtttgctctcatcagcaatccacgctgccagcacgctgcggttctcatccggactagcaaaagcgatatggctgtcgcccgtaccggcaaatttgccgccgtaagcgcgatagttattggtggcaaccaggaacatggcgttcggatcaatcggcttgccattaaaggtcaggttcttaatcctttccgcattggcattaatcatctggcactcgccgtcataacgggcgggctgggtaacatcaatctgataattcacaccatcaataacatcaaagttataagtgcggaaaccatcccagttgatgagactctgtggtttcgtgctgttgggatcaatctggttaaactgtcccgcggagcactccagccactctttcacctctttaccgctggctttcaccacaatcagcgtattgggatagagataaagatcggcggcattacggaaggtcaactggcctttttccacctccacatagcttgccgggtcatttttgcgaccaccgactttaaacggtgcggcagcactaagcaccggcagttttgccagatccggatcgccctgaatgtaatgctcgacatacgctttttgcgcgttgttcaccacctgcacggtcggatcgtcctgcaccagcgccagatagctatacatattgtcggcagatttaccgattggcttgctgacgaactggcgtgtggcatcgtgatcggctttgagtgtttctaccagcttgctgtcttccgccgcgagggattttttattagcgatgtcgtaaatcggtcgtgcttccgctttcgcctgcgtcacctgccatttaccgctgtcattactgagttgtaagtcgaccacaccaagatgatcgccccacatgcctggcattaccgccggaacaccattcagcgtgcctttggcgatatcagccccttcgatatcagcaaaatctttacctgggaaaacggcgtgagcatggccaaacataatggcgttaacgcccggaatttcactgaggtaataaacactgttttccgccatcactttatacggatcggcagatagcccggaatgtgccagaacgacaacaacatcggcacctttctcgcgcatttcaggcacgtatttgcgcacggtttcggtaatatcattcaccgtcactttcccggataaattagctttatcccagcccatgatttgtggtggcacgacgccaatatagccaatcttcagcgtctgtttttttccgtctttatcgaccacttcggtgtctttaattaaatacggtgtaaacattggctgtttggttctggcgtcaatgacgttggcatttacataagggaatttcgctcctgccagcgcatttttcaggtaatccagaccgtagttaaactcgtggttgccaagcgttccgacggtatagtccagcgtatttaatgccttatagaccgggtgaatatcacctgcttttaatcctttcgcgctcatgtaatcggccagcggactcccctgaatcaaatcgccgttatcaaccagtacgctgtttttcacttcattgcgggcatcgttaatcaggcttgccgtacgtaccagtccgaatttttccgtggcggtgtctttgtaataatcgaaatccatcatgttgctatgcagatcagtggtttccatgatacgcagatcgaccgtcgctgcattcacactggcggcaatcagcgtggccaggagcgttgcgctaaacttaatcatcagggacatccttttatcatcgggaatacgaaagaaaagggagaataaacgtcttacttatagaacagtgaagaatgccacaattttacgctttgaaaatgatgacactatcacagttggcgcattcattaacgatagggtataagtaaaacaataagttaacaccgctcacagagacgaggtggagaaatgttagatcaagtatgccagcttgcacggaatgcaggcgatgccattatgcaggtctacgacgggacgaaaccgatggacgtcgtcagcaaagcggacaattctccggtaacggcagcggatattgccgctcacaccgttatcatggacggtttacgtacgctgacaccggatgttccggtcctttctgaagaagatcctcccggttgggaagtccgtcagcactggcagcgttactggctggtagacccgctggatggtactaaagagtttattaaacgtaatggcgaattcaccgttaacattgcgctcattgaccatggcaaaccgattttaggcgtggtgtatgcgccggtaatgaacgtaatgtacagcgcggcagaaggcaaagcgtggaaagaagagtgcggtgtgcgcaagcagattcaggtccgcgatgcgcgcccgccgctggtggtgatcagccgttcccatgcggatgcggagctgaaagagtatctgcaacagcttggcgaacatcagaccacgtccatcggctctagcctgaaattctgcctggtggcggaaggacaggcgcagctgtacccgcgcttcggaccaacgaatatttgggacaccgccgctggacatgctgtagctgcagctgccggagcgcacgttcacgactggcagggtaaaccgctggattacactccgcgtgagagcttcctgaatccggggttcagagtgtctatttactaaattcagatggcagaaacagtgtatttcctgattctgccatcctgatttctcccaacctaaaaagttataaataaaaagagattgtatttaaagtgcaaaaattcaattgctaataagttacattttaataatgagcgttttttgatagtttacttctatagtgagatatttaatggcgacataaagtaaccaaataaaataaggttgtcatatgttacccaggatcagacacaataattttattggtgcggtggagttatttgtaaagtctagctatacaaaaacacatagtaacaatttttttaacaacatccatcatgcatttaagaaaaaagattggattagcaattatgatagcctgttaactttgagggagttctttcgttgcgcaactcagattgataaaagtggttatcaggtgcttagtagtaaaaatgaaactgttcacgccatggataagtttcttatcagtttcagccttaaagataacggtgccgaatatacaatgacattgcgaggtagtggatttgaatacgaagaaatacccataacaataaatgaatataacagtttcatggatttcaaaaaccgtgaatttccgttagaacaaaacagacgattgtatgcccgggatattctacagaaaaaacagtctgacataccgaaaaggattaaaggttatattcaccaggcgattggtgacgtgtctttaggttatgccttattggaggatatagtaagcaaattaaaacggggtaaatttgaactccaaataccaggaggtggaattaaagaatgcgatggatggtatatttacgaaaaaataattgatgataattttgccatagtcatagaatctttgggctttgcgcttaaaatctatggaggggatgaacgttttcgtaatggttcctctgttgttttggaggatgaagattactctcttatttataattttctggttaatgcaggttgccaacaagtcgaattagccgaacaagtggatgcgatagtaagtgcgaatctggccgcagatagcgatattaccaaagaaaagatttgcgagaaatataaaagcaccattgaggcgtttaaaaaagagcaactagcgttaccagtattagttcggcgtaagaacagtgagacttaattcccctatcccatagataacgataggggaaaattatttttgcagaatttatgttattgccattatttgagcaacttttgcagcaggtccatcacttgctgcacctcttccggtgtgagcgccccgtctttggcccattgcacgcgaccatccttatccagcaccactacagcggaactttcttcatccagctgccaggcaccgagcgcgacgccattgctatcgacaataaactggctccagggataaagctttttattactctccagactgctgcgcacaaacatcccactacccggaatcgcgtcgtcggtgttaacaatggtggtggtctggtaacgatcgtgcggtaacttcgcacttttaatcgcttcaatcagcgtcgcgtttttctcttttgcagaggtgcgaccagcaatatgttgcagtactcgcacttttcccactaactgcgcgctgttccaggttttgtagctaaactgatctttatcaagcaccaactcgccccgatcggtaatgccaatcggcggcactcgctgaccggtttcgaactgatgtgcggaagccatcatcggcaacagcaggcaggtgagtgccagaatcttgcgtagggtcatggtgtttccttcttatgatatgcaggtgatccgaccacttgggtctgagttttaatcatatgtgctatttatcgaatttcccgcaagtgtgatgccagtttgcggtcaagcgcacaaatcatatgaaaaatgaatgcttatactgaagaccgcgcttcggtaaaaagataattctgaataattgtaacctttaggtaaaaaaagttatacgcggtggaaacattgcccggatagtctatagtcactaagcattaaaatttgcgcctcataatagttgggccgattgtggcaccgcacaggcgtaatactcagcaggagataacaatgaaaattttccaacggtacaacccacttcaggtggcgaagtacgtaaagatcctgttccgtggacggttatacatcaaggacgttggcgcttttgaattcgataagggtaagattcttatcccaaaagtgaaggataagctgcatttgagtgtgatgtccgaagttaaccgtcaggttatgcgtctgcaaacagagatggcttaaccaaagtgctatgcagtaaaaagtgctatgcagtaataagacggctcctgattcaggagccgttgatgtttctgggggttacgcgacgctttcttctttatctttagcgtcaggcagttttgggctaagggcggtggccttgctgtcgatccgggtcaccagcagctggtcgatgcggtagttatcgatatccaccacttcaaatttgtagccggcgaatttcacgctatcggtgcgtttcgggatcttacgcagcataaacatcataaagccgccgatggtttcgtagttgccgctctgcgggaactcgtcaatatccagcacgcgcatgacgtcgtcaattggggtgccgccgtcaatcagccaactgttctcatcacgggcgacaatctgctcttccagcccctgaccgaccagatcgcccatcagcgtggtcatcacgtcattgagggtgatgatccccaccaccagcgcgtactcgttcatgatcaccgcgaagtcttcacctgcggttttaaaactttccaacgcctcactaagggttaacgtatccggcacaatcagcgtgttgcgaatttgtacgccgctgttcagtgccaggctttggttagccagcacgcggttcagcaggtctttagaatcgacataaccgatgatgtggtcaatatcttcattacagacgaggaacttagagtgcggatgttccgccaccttattcttcaggctttgctcatcttcgtggagatcaaaccaaatcacgttttcacgcggtgtcatactagacggaacggtacgggattccagctcaaagacgttttcaatcagctcgtgttcctgtttacgtaacacgcccgccagcgcaccggcttccactaccgcgtagatgtcatcagaagtgatgtcatctttacgtaccattggcagtttgaaaatacggaagattatgttcgccaggccgttgaagaaccacaccagcggggtgcaaacgtacaggcagaagcgcatcgggttgatgatacgcaaagccacagcttctggcgcaatcataccgatgcgtttcggggttaaatccgcaaacaggataaacatgccagtcactaagctgaaagagagaataaagctcagttgctcagagagctctgcgctcatatagcgggagaacaggctgtgaaaagctggagaaaatgccgcatcaccgacgataccgccgagaatcgccactgcgttcagaccgatttggaccacggtaaagaacatgccgggattttcctgcatattcagaacgcgttgggcatttatattgccttcatcagccagcagtttaagtttgattttgcgactggcggcaaggctgatctcggacatgctgaagaacgcacttacagcgatcaagcagagtatgactaaaatactgtttaacatatcttatccgacctttcaggccagatcctcggaaggggaagttgattaatttgtgtgaaatacacattgaaagccgattcgaagaaagtgaaccggcattttcagtggctagtatagcgtaaggtactgtaaagccgccagagggttaaaattcagacagctgaaaaatgcaaaactgcctgatacgctatgccgatcaggcctacgcagtccttgcaatatattgaatttggacgattttgtaggcctggtaagtcgtttacgccgcatcaggcatagacaaagagcactttatcaacaaactacatttgtacccgtaacgttatgcttccggcggcagacagacgccaattccgccaattccacagtaaccatacgggtttttatgcagatattgctggtggtcatcttcggcataataaaacggtgtggcgttagcgatttccgtggtgatgtgacgatcgtcatcggcggcaagcatcgccgcctgaaaacgttccagactggcgcgagctgcggcatcctgttctggggtcagcggataaatcgcactacgatactgcgtgccgtggtcattgccctgacgcattccctgggcgggatcgtgattctcccaaaatacctgtagcaactgctcatagctgatgacggaaggatcgtaaacaatgcgtaccgcttcggcatgacccgtatcaccggagcacacttcccgataagtcggatttggcgtatagccgccggtatagcctgcggcggtgctgtaaacgccgggtaactgccagaacagacgctccacaccccagaaacaacccatcgcaaaaatggcaatctccattccgtcaggtacattggtcatactgtgaccgttgaccgcatgcagcgtggctacgggcatcggggtgttacgtccaggcagggcatcggcgggggaaaccagatgctttttatcaaataaactcatggtgtcgctctcccgaaaatcggtcattggggttaaggttgtaacaagaggcgtatttgcacacaataaccaccgtgaataggtctaaagtaaaacataagaaatatttggggtttagtctgctttttaatccatattactggatttttgttaagccgtttaacggcgttccaggggcaggaaaaaaggatattcaggagaaaatgtgcgctatatccgacagttatgctgtgtaagcttactctgcttaagcggatctgccgtcgccgcgaacgtccgtctacaggtcgaggggttaagcggacagctggaaaagaacgttcgtgcgcagctttctacgattgaaagtgatgaagtgacgccagaccgtcgctttcgcgcacgcgtcgatgatgccatccgcgaaggtctgaaagcgctgggttattaccagccgaccattgaatttgatctccgtccaccgccaaagaaagggcggcaggtattgatcgccaaagtcacgccaggcgtgccggtgttaattggcggcaccgatgtggtattgcgcggcggcgcgcggaccgataaagactatttgaaattgctcgatactcgcccggctattggcacggtactgaaccagggcgattatgaaaatttcaaaaagtccttaaccagcattgcgttgcgtaaaggttatttcgatagcgaatttaccaaagcgcagctgggcattgcgctcggcctgcataaagccttctgggatattgattataacagtggcgaacgttaccgctttgggcatgtgacctttgaaggaagtcaaatccgcgatgaatacctgcaaaatctggtgccgtttaaagagggcgatgagtacgaaagcaaagatctggcagaactgaaccgccgactttctgctaccggctggtttaacagcgtggtggtggctccacaatttgataaagcgcgcgaaacgaaagtattaccattgacgggcgtggttagcccgcgaacagaaaacaccatcgaaaccggggtcggttactctacggacgtgggaccgcgcgtgaaagcgacgtggaaaaagccgtggatgaactcttatggtcacagtctgaccaccagtactagtatttccgcgccggaacagaccctcgacttcagctataaaatgccgctgctgaagaatccactggaacaatattatttggtgcagggcggttttaagcgcactgacctgaacgataccgaatctgactccactacgctggtggcttctcgctactgggatctctccagcggctggcagcgtgccattaacctgcgctggagtctcgaccactttactcagggtgaaattaccaataccacgatgctgttttatcctggggtgatgattagccgcacgcgttctcgtggtggcctgatgccaacctggggcgacagccaacgctactctatcgactactccaacacggcctggggtagtgatgtcgatttctccgttttccaggcgcagaacgtctggatccgcacactgtacgatcgccatcgttttgttacacgcggcacgctgggctggattgaaaccggtgatttcgacaaagtaccgccggatctgcgtttcttcgccgggggcgaccgcagtattcgtggctacaaatacaaatctatcgctccgaaatacgccaacggtgacctgaaaggggccagcaagttgataaccggaagcctggaataccagtacaacgtgaccggaaaatggtggggcgcggtgtttgtcgatagtggcgaagcggtaagcgatattcgccgcagcgactttaaaaccggtaccggggtcggcgtgcgctgggaaagcccggtcgggccaatcaaactcgattttgccgtaccggtcgcggataaagacgaacacgggttacagttttacatcggtctggggccagaattatgagtttatggaaaaaaatcagcctcggcgtggttatcgttatcttactgttgctgggaagcgtggcgtttctggtgggcaccaccagcggcctgcatctggtatttaaagcggcggatcgctgggtgccaggactggatattggcaaggtcaccggcggctggcgcgatctcaccttgtctgacgttcgttatgagcagccaggcgtggcggtaaaagcgggcaatctgcatctggctgtcgggcttgagtgcctgtggaacagcagtgtttgtattaatgatctggcgctgaaagacattcaggtcaacatcgacagtaaaaaaatgcctccttctgaacaggttgaagaagaggaagatagcggtccgctggatctctccacgccgtatcccatcaccctgacacgggtggcactggacaacgtcaacattaagattgatgacaccacggtaagcgtgatggacttcacctccggcctgaactggcaggagaaaaccctgaccctgaaaccgacgagcctgaaaggcctgctgattgctctgccgaaagtggcggaagtggcgcaggaagaagtggtcgaaccgaaaattgaaaatccgcagccggatgaaaagccgctcggcgaaacgctgaaagatctcttttctcgcccggtattgccggaaatgaccgacgtgcatttgccgcttaacctgaacattgaagagtttaagggcgagcagctgcgcgtgacgggcgacacggacatcaccgtgagcaccatgctgctgaaagtgagcagcattgacggcaatactaaactggacgccctggatatcgattccagtcaagggatcgtcaacgccagcggcacggcgcagctgagtgacaactggccggtggacatcactctcaacagtacactgaacgtggagccgttgaaaggtgaaaaagtgaagctgaaaatgggcggcgcgctgcgcgaacagctggagattggcgttaatctttccggtccggtggatatggatttacgcgcccagacgcgactggcggaagccggattgccgctcaacgtggaagtgaacagcaaacagctttactggccgttcactggtgagaagcagtatcaggcggatgatctgaaactgaaacttaccggcaaaatgaccgattacacgctctctatgcgtacggcagtgaagggacaggagatcccgcccgcgactattaccctcgacgccaaaggtaatgaacagcaggtcaatctcgacaaactcaccgtcgcggcgctggaagggaaaactgaactcaaggcgttgctcgactggcaacaggccattagttggcgcggtgagctaacgcttaacggcattaacaccgccaaagagttcccggactggccgagcaaactcaatggcttgattaaaacccgcggtagcctgtacggcggcacctggcagatggacgtgccggagttgaagctgaccggtaacgttaaacagaacaaagtgaacgttgacggcacgctgaaaggcaacagttatatgcagtggatgatcccagggcttcatctggaactcgggccaaacagtgccgaagtgaaaggcgagctgggggtaaaagatctcaatcttgatgccaccatcaacgcgccggggctggataacgcgctgccggggcttggcggtacagcgaaagggctggtgaaagtacgcggcacggtggaagcgccacaactactggcagatatcaccgcgcgcggcctgcgctggcaggaactttccgtggcgcaggttcgcgtggaaggcgatatcaaatccaccgatcagatcgccgggaaactcgacgtacgcgttgagcaaattagccagccggatgtaaatatcaacctcgtcaccctgaatgccaaaggcagcgaaaagcagcacgagctacagttgcggattcagggggagcctgtctccgggcagcttaatctggcaggaagttttgatcgcaaagaagaacgctggaagggaactcttagcaatacccgcttccagacgccggttggcccgtggagcctgacccgcgatattgcgctggattaccgcaataaggagcaaaaaatcagcatcgggccacactgctggcttaacccgaatgcggaactgtgcgtgccgcaaactatcgatgcgggggccgaagggcgtgcggtggtgaatctcaaccgcttcgacctcgccatgctgaaaccgtttatgccagaaaccactcaggccagcggtatcttcacgggtaaagcggacgttgcctgggacaccacgaaagaggggctgccgcagggcagtatcacccttagcgggcgtaacgtgcaggtaacgcaaaccgtcaacgatgcggcgctgcccgtggcgtttcagacactgaatctgacggcggaattgcgtaacaaccgtgccgaattgggctggaccatccgcctgaccaataacggccagtttgatggacaggtgcaggtgaccgatccgcaaggccgccgtaatcttggtggcaacgtcaatatccgtaacttcaaccttgcgatgataaaccccatctttacccgtggggaaaaagcagcggggatggtgagtgccaacttgcgtctgggtggtgatgtgcaaagcccgcagttgtttggtcagcttcaggttacgggtgtggatatcgatggcaactttatgccgtttgatatgcaaccgagccagcttgcggtcaactttaacggtatgcgcagcacgcttgccggtacagtacggacccagcagggtgaaatctacctgaacggtgatgccgactggagccaaattgaaaactggcgggcgcgggtaacggcgaaaggcagtaaagtgcggatcaccgtgccgccgatggtacgaatggatgtaagcccagatgttgtattcgaggctacaccaaacctgtttaccctcgatggtcgcgtggatgtcccttgggcgcgcatcgtggtgcacgatctgccggaaagcgcagtaggcgtctccagcgatgtggtgatgcttaacgataacctgcaaccggaagagccgaaaacggcgagcattccgattaacagtaacctgattgtccacgttggcaacaatgtgcgcattgacgcctttggcctgaaagcgcggctgacgggcgatctcaatgtcgttcaggacaaacaagggctgggtctgaacgggcagatcaacatccctgaagggcgcttccatgcctatggtcaggatctgattgtgcgtaaaggtgagttactgttctctggtccgccagatcaaccgtatcttaatattgaagctattcgtaacccggatgctacagaagacgacgtaatcgccggagttcgcgtcactggtctggcggacgaaccgaaagcggagatcttctctgacccggcgatgagccaacaagctgccttgtcttatttgctacgtggacaagggctggagagcgatcagagcgacagtgcggcaatgaccagcatgctgattggtttgggggttgcgcaaagtggccagattgtgggtaaaatcggcgagacgtttggcgtaagcaatttagcgctcgacacccagggagtaggcgactcctcccaggtagtggtcagcggctatgtattgccaggtctgcaagtgaaatacggcgtgggtatatttgactctatagcaacactcacgttacgttatcgcctgatgcctaagctatatctggaagccgtgtctggtgtagaccaggcactggatttgctctatcagttcgagttttaacaatgcgaatatttgtctacggcagtttacgccacaaacaaggcaacagtcactggatgaccaatgcccagttactgggcgatttcagtatcgataactaccagttgtatagcctgggccactatccaggcgcagttccggggaacggaacggtacacggtgaagtttatcgtattgacaacgccacgctggccgaacttgatgccttgcgcaccaggggcggtgaatacgcgcgccagttgattcagacgccgtacgggagtgcatggatgtacgtttatcaacgacccgtcgatggattaaagctaattgaaagcggcgactggttagacagggataagtaaccatatgcatacgccaccttcgggtggcgttgttttttgcgagacgactcgcattctgttttgtaattccctcaccttttgcttttctctccgagccgctttccatatctattaacgcataaaaaactctgctggcattcacaaatgcgcaggggtaaaacgtttcctgtagcaccgtgagttatactttgtataacttaaggaggtgcagatgcgtattaccataaaaagatgggggaacagtgcaggtatggtcattcccaatatcgtaatgaaagaacttaacttacagccggggcagagcgtggaggcgcaagtgagcaacaatcaactgattctgacacccatctccaggcgctacagccttgatgaactgctggcacagtgtgacatgaacgccgcggaacttagcgagcaggatgtctggggtaaatccacccctgcgggtgacgaaatatggtaaagaaaagtgaatttgaacggggagacattgtgctggttggctttgatccagcaagcggccatgaacagcaaggtgctggtcgacctgcgcttgtgctctccgttcaagcctttaatcaactgggaatgacgctggtggcccccattacgcagggcggaaattttgcccgttatgccggatttagcgttcctttacattgcgaagaaggcgatgtgcacggcgtggtgctggtgaatcaggtgcggatgatggatctacacgcccggctggcaaagcgtattggtctggctgcggatgaggtggtggaagaggcgttattacgcttgcaggcggtggtggaataaggtgtgtttatttatcgcgggcataaaaaaacccttactaaccgaagcccggcgttcagggttattacgccagaagaacttatttattctttgcgcgctcgaaggaggcaacgatttcagctttagcggcttctgcgttttcccaaccttcaactttcacccacttgcctttttcgaggtctttgtagtgctcgaagaagtgagcgatttgcgctttcagcagttcaggcagatcgttaacgtctttaatgtgatcgtattctttgctcagcttgctgtgcggaaccgcaaccagtttcgcatcttcaccggcttcgtcggtcattttcagaacgccaaccggacggcaacggatcacagaacccggctgcagcgggtacggagttgggaccagtacgtcaaccgggtcaccgtccagagacagggtgtggttgatgtaaccgtagttgcatggatagaacatcgcggtggacatgaagcggtcaacgaacagtgcgccgctctctttgtcgatttcgtatttgatcggatctgcgttagccgggatctcaataacaacgtagatgtcttccggcagatctttacccgcagggacgttgagtaagctcatgtctgtttcctttaaaaatatgtggcaaacaagtgccgagtattatagccaactcgcgccgaatgtcttcgcttgttttcgtcttcattttcctttttcaccagttttaagacggtatacagagcaggaaaatccataaccgtagccgcatttttcatagtgagatgaaagcgattacaaacttgtgattaacgttttatttacttttttgaagtgtgatgtaacgcaatctgttacataacgaattgtctatagttttttcgcgaacatcttttaaccaataataactaccccgacgaggacaaccctatgtggaaacgcttacttatagtctctgcagtcagcgcagccatgagctctatggcgttggccgctccattaaccgttggatttagccaggtcggaagcgaaagtggctggcgtgccgcagaaaccaatgtggcgaaaagtgaagccgaaaagcgcggaatcacgttgaaaattgccgatggtcagcaaaagcaggaaaaccagattaaagcggtacgttccttcgttgcacaaggggtggatgcgatctttatcgctccggtggtcgcgacaggttgggaaccggtattaaaagaggcgaaagatgccgaaatcccggtattcttgctcgatcgttccattgatgtgaaagacaaatctctctatatgaccaccgtcactgccgacaacatcctcgaaggcaagttgattggtgactggctggtaaaagaagtgaatggcaaaccatgcaacgtggtggagctgcagggcaccgttggggccagcgtcgccattgaccgtaagaaaggctttgccgaagccattaagaatgcgccaaatatcaaaatcatccgcagccagagtggtgacttcacccgcagtaaaggcaaagaagtcatggagagctttatcaaagcggaaaacaacggcaaaaacatctgcatggtttacgcccataacgacgacatggtgattggtgcaattcaggcaattaaagaagcgggcctgaaaccgggcaaagatatcctcacgggttccattgacggtgtaccggacatctacaaagcgatgatggatggcgaagcgaacgccagtgttgaactgacgccgaatatggcaggtcccgccttcgacgcgctggagaaatacaaaaaagacggcaccatgcctgaaaagctgacgttaaccaaatccaccctttacctgcctgataccgcaaaagaagaattagagaagaagaaaaatatggggtattgagggttgctatgcctgatgccgattcgtaggccggataaggcgctcgcgccgcatccggcgatggtgcactgaagcctgatgcgacgcttaccgcgtcttatcatgcctactgggagcacgctttacaccgggggaaaccatgacgaccgaccaacaccaggagatcctccgcaccgaaggattaagtaaatttttccccggcgtcaaagcgttagacaacgttgatttcagcctgcgccgtggcgaaatcatggcgctgctcggtgaaaacggggcgggaaaaagtacgctaatcaaagcattaactggtgtataccacgccgatcgcggcaccatctggctggaaggccaggctatcagtccgaaaaataccgcccacgcgcaacaactcggcattggcaccgtctatcaggaagtcaacctgctacccaatatgagcgtcgctgataatctatttataggccgcgaacccaaacgcttcggccttctacgccgcaaagagatggaaaagcgcgccaccgaactgatggcatcttacggtttctccctcgacgtgcgcgaaccgctcaaccgctttagtgtcgcgatgcagcaaatcgtcgctatttgtcgggctatcgatctctctgccaaagtgctgatcctcgatgaacccaccgccagtctcgacacccaggaagtggagttactgtttgacctgatgcgtcagttgcgcgatcgcggcgtcagcctgatttttgtcactcactttctcgatcaggtctatcaggtcagcgatcggatcaccgtcttacgcaacggcagtttcgtaggctgtcgggaaacgtgcgagctaccgcagatcgaactggtaaaaatgatgctggggcgcgagctggatacccacgcgctacagcgtgccgggcgaacattgttgagcgacaaacccgttgccgcgttcaaaaattacggcaaaaaaggaacgatcgcaccgtttgatctcgaagtacgccccggcgagatcgtcggtctggctggattgctgggaagtggacgtaccgaaaccgccgaagtgatcttcggtatcaaacctgctgacagcggcacggcgttgatcaaaggcaaaccgcaaaacctgcgaagcccacatcaggctagcgtactgggcattggcttctgcccggaagacaggaaaaccgatggcatcatcgctgccgccagcgtgcgggaaaatatcatcctcgctctccaggcccagcgcggctggctacgtcccatttcccgcaaagaacagcaagagattgccgaacgctttatccgccagcttggcattcgcacacctagtactgaacaaccgattgaatttctctccggcggcaatcagcaaaaagtgttgcttagtcgttggctactgacccgaccgcaatttctgatcctcgatgagccaacccgcggcattgatgttggtgcccacgccgagatcatccgcctgattgaaacgctatgcgccgatggtctggcgctgctggtgatctcctccgaactggaagagctggtgggctatgccgatcgggtgattatcatgcgcgatcgcaaacaggtggcggagatcccgctggcagagctttccgttccggcgatcatgaacgccattgcggcgtaaggagaacagtgtgatgcctcaatctcttccggacaccactacgccaaaaaggcgctttcgctggccgacggggatgccgcagctggtagcactgttgctggtgctgctggtcgatagcctggtagccccgcatttctggcaggtggtgcttcaggatgggcgtttgttcggtagccccatagacattcttaaccgtgcagctcccgttgcgttactggcgattggcatgacgctggtgatcgccaccggtgggattgatctctccgtaggggcggtgatggctatcgccggagccacaacggctgcgatgacggtcgcgggattcagcctgccgattgttttgttaagcgccctgggcaccggcatcctggcgggattgtggaacggcatactggtagcgatcctcaaaattcagccgtttgtcgccactctgatcctgatggtcgccgggcgcggcgtggcgcaactgatcaccgccgggcagatcgtcacgtttaacagcccggatctcagttggttcggcagtggaagcctgttgttcctgccaacgccggtcattatcgcggtgctgacgcttatcctgttctggctgttgacccgcaaaacggcgctggggatgtttatcgaagccgttggtatcaacattcgggcggcaaaaaatgccggggtaaacacgcgaatcatcgtcatgctcacttatgtgttgagcgggctgtgtgcggcgattgcgggcattatcgtggcggcggatattcgcggtgccgatgccaacaacgctgggttatggctggagctggacgccattctcgcggtggtgattggcggcggaagcctgatgggcgggcgctttaacctgctacttagcgtggtgggggcgctgattattcaggggatgaacaccggaattttgcttagcggctttccgccagagatgaaccaggtggtgaaagcggtggtggtgctttgcgtgctgattgttcagagccaacgctttatcagtctgattaaaggagtacgtagccgtgataaaacgtaatttgccactgatgatcaccatcggcgtctttgtgttgggttatctttactgcctgacccagtttcccggttttgcttccacaagagtgatctgcaatatcctgaccgataatgcctttcttgggatcattgccgttggcatgacctttgtgatcctcagtggtgggatcgatctctccgtcggtagcgtgatcgcctttactggcgtgtttctggcaaaagtgattggcgatttcggcctcagcccgctgctggcgtttccgctagtgctggtgatgggctgtgccttcggcgcatttatggggcttctgatcgacgccctgaagatcccggcatttatcattacgcttgcggggatgttctttttgcgcggcgtcagctatctcgttagcgaagagagcattccgataaaccatcccatttatgacacgctcagtagccttgcgtggaaaatccctggcggcggtcgcttaagtgcgatgggactgctgatgttggcggtggtggttatcggcatattcctcgcgcatcgtacccgttttggtaatcaggtatacgccattggcggcaacgcaacgagcgcgaatctgatggggatttccactcgcagcaccactattcgcatttatatgctctccaccggactggcaacgctggcggggattgtcttcagcatttatacccaggccggatatgcgctggcgggcgtaggtgtggaactggatgctatcgccagtgtggtaattggcggtacgcttttgagcggtggcgttggaacggtattagggacgctttttggcgtggcgattcagggactgattcagacttacataaactttgatggcacgctgagttcctggtggacgaaaatcgccatcggtattttgttgtttatttttatagcattacagcgtggattaacggtgctgtgggagaatcgtcagagtagcccagtgacaagagtcaacattgcgcagcaataaaaacgcctctccgtgtggagaggcgcaggagattacgcgtccgggaactcacggataaagcgttcgacatcttcaaccatatggtcgttgccgacaaagaaactacggcgctggtgcagggtttccgggatgatatccagaatacgctctttgccatcgctcgctttaccgcccgcttgttccgccaggaatgccatcgggttgcactcatacagcaaacgcagtttgccgtccgggtggctggcggtgcttgggtagagataaataccgcctttcagcaggttacggtggaaatccgcgaccagactaccgatataacgactggtataagggcggttggtggatttatcttcttcctggcagaatttaatgtacttcttcaccccgttcggaaacttaatgtagtttccttcgttgatggagtaggttttgcctttctccgggaagcgcatccgttcctggcacaggcagaaaacgccgaggctaggatcgtaagtaaaggcgtgaacaccgcatccggtggtgtaaaccagcatggtagaggagccgtataccacgtaacctgccgcaacctgtttgttaccaggctggaggaaatcttcttccgttaccggcgtgccaacaggcgtaacgcggcggtagatggagaaaatggtaccgacagagacgttaacatcgatgttggagctgccatccagggggtccatcagcaccacgtattttgcgtgttcacagccttcaaagacgacaatctcatcttcttcttcagaggcaatgcccgcaacgatatcgcgtgctttcagtgcggctttcagtttttcattagcgaacaagtcgagtttctgctgaacctcgccctgcacgttctcagcaccgctggcacccaggatatcaaccagtcctgctttgttgatatcgcgatggataatcttggcgcccagttttattgcgctcagcaaagcagtgagctcaccggtagcatgagaaaactcgtgctgcttttcgacaataaattcacctaacgttttcataaaactttccctgcaatgtttatggagtaaagcgaccgcaacaatcttaacaaataatctcaatgttgcgctcaggtgaatcgcgccagcaaattacggattatcctgaaatgcgtttctcacttgcccgacatatgcgtaaaatgagcggcagattaaaaaaggatagtgacgtatgcgcattcatattttaggaatttgtggcacatttatgggcggtctggcgatgctggcgcgccagttaggccatgaagtaacgggtagcgacgccaatgtgtatccgccgatgagcaccttacttgagaagcaaggcattgagctgattcaggggtacgatgccagccagctcgagccgcagccggatctggtgattattggcaacgccatgacccgtggaaatccgtgtgtggaagcggtactggaaaaaaatatcccttatatgagtggtccacagtggctgcacgattttgtgctgcgcgaccgctgggtgctggccgttgccggtacacacggcaaaaccaccaccgcgggaatggcgacctggattctggaacagtgtggttacaaaccgggctttgtaatcggcggtgtgccggggaactttgaggttagcgctcatctgggcgaaagcgacttctttgttatcgaagcggatgagtatgactgcgccttcttcgacaaacgctctaaatttgttcattactgcccgcgtacgctgatcctcaacaaccttgagttcgatcacgccgatatctttgacgacctgaaagcgatccagaaacagttccaccatctggtgcgtatcgttccggggcagggccgtattatctggccggaaaatgacatcaacctgaaacagaccatggcgatgggctgctggagcgagcaggagctggtgggtgagcagggtcactggcaggcgaaaaagctgaccaccgatgcttccgaatgggaagttttgctggatggcgaaaaagtgggcgaagtgaaatggagcctggtaggcgaacataatatgcacaatggcctgatggcgattgcagcggctcgccatgttggtgtagcgccggcagatgccgctaacgcgctgggtagctttattaatgctcgtcgccgtctggagttgcgtggtgaagcgaatggcgtcacggtatatgacgattttgcccatcacccgacggcgattctggcaacgctggcggcgctgcgtggcaaagttggtggtacggcgcgcattattgctgtgctggagccgcgcagcaataccatgaaaatggggatctgcaaagacgatctggcacctagtttaggtcgtgccgatgaagtcttcctgctgcaaccggcgcatattccgtggcaggtggcagaagtggcagaagcctgcgttcagcctgcacactggagtggcgatgtggatacgctggcagatatggtggtgaaaaccgctcagcctggcgaccatattctggtgatgagcaacggcggttttggtgggatccatcagaaactgctggatgggctggcgaagaaggcggaagccgcgcagtaattcggccttagccagatatagtatgcgtaggccggataaggcgttcacgccgcatccggcatttgagcatagtgcctgatgcgacgcttgatgcgtcttatcaggcctacaggtgcaccgtatccggcaaaccatactcacatcaacaacgaaaattacccttcgttctccgctaactcgcgcagatactggaaaatctggcgtgcggatttcggcggcttattcccttctttctctttcttcgcgttgcggatcagagtacgcagttgctgacgatcggcatcgggccacagatttaatacctcagcgatggcgtcatcaccttgatcgatcagacgatcgcgcaggttttccagtttatggaacagcaccacctgctggttgtgacggtttttcagcttatccagcgcctgacgaataggctctacgtcgcgctggcgcagcatcttaccgatgagctgcaactggcggcggcgaccttccatcttaatacgctgggcgagctcaatagccgcgcgcagatccgcatctaacgggatcttatccagcgcgtttttccccagatcaacaatttccgcgccaaggcgttttagctcctcggcatcacgtttaatttcacttttactgacccagataatttcatcgtcttcgtcttcgatgtcatcaccgggaacgtcgtcgagccagtcttcgggctgcttagtcatctcaggctccttaaaaaaagaggctaatgttaccagttaagatgcgcactgaaaaacggttctctgttagacttcagagaaactctctacattatggcacttgcaatgaaagtaatctctcaagttgaagcgcagcgcaagattctggaagaagcagtttccactgcgctggagttggccagtggcaaaagcgacggtgcggaagttgccgtcagcaagaccaccggcattagcgtaagcacgcgttatggtgaagtggagaatgttgaattcaatagcgatggcgcgctggggatcactgtttatcaccagaaccgcaaaggtagcgcaagttccaccgatttaagcccgcaggccattgcccgtactgtacaggcggcgctggatattgcccgttataccagcccagatccctgtgccggcgtggcagacaaagagctgctggcctttgacgcaccagatctcgacttgttccaccctgcggaagtttccccggatgaagccattgaactggcggcccgcgcagaacaggcggcattgcaggcggacaaacgcatcaccaataccgaaggtggcagctttaacagccactacggtgtcaaagtttttggcaacagccacggcatgttgcagggttactgcagtacgcgtcatagcctctccagctgtgtaattgccgaagaaaatggcgatatggagcgtgattacgcctacaccattggtcgtgcgatgagcgatctgcaaacgccagagtgggttggggccgactgtgctcgccgtactttaagccgtctgagtccgcgtaaactctccaccatgaaagcgccagtcatttttgccaatgaagtggcaaccgggctttttgggcatctggtgggggcgatagcgggtggaagcgtttatcgtaaatctaccttcctgctggatagcctgggtaaacaaattctgccggactggctgaccattgaagagcatccgcatctgctgaaagggctggcgagcacgccattcgacagcgaaggtgtgcgcaccgagcgtcgcgatattattaaagatggcatcctgactcagtggctgctgaccagctacagcgcgcggaaactggggctgaaaagcaccggacatgcgggcggtattcacaactggcggattgccggacaaggtctaagcttcgagcagatgctcaaagagatgggcaccgggctggtggtgacggaattgatgggccagggcgtgagtgccattaccggtgattattcccgtggtgcagcgggcttctgggtagagaatggcgaaattcagtatccggtgagcgaaatcaccatcgcaggtaatttaaaagatatgtggcgcaatattgtcaccgtcggtaacgatattgaaacacgcagtaatatacagtgtggttctgtgctgttgccggagatgaaaatcgccggacagtaaaaaaactggcgcgacctgccgcgctataaactaaaaaattacacaaaatcattcgcactgcatcgagacggaaagtgaatgagggccggggagcgtactcgcagtacgtgacccggtcgaatgagcgtagtcgtcgatgaggcagtgtgaaggatgaagtgtaaataaaaaaggaactattcttgcagtctcctcgttggtattcagttcggcgtcatttgctgctgatctcgaagacaatatggaaaccctcaacgacaatttaaaagtggtcgaaaaagccgataacgcggcgcaagtcaaagacgcgttaacgaagatgcgcgccgcagcgctggatgcgcaaaaagcaacgccgccgaagctcgaagataaaagtccggacagcccggaaatgaaagatttccgccacggtttcgacattctggtcggtcagattgacgacgcgctgaagctggcaaatgaaggtaaagtaaaagaagcgcaggctgctgcagagcaactgaaaacgacccgcaatagttatcacaagaagtatcgttaattcctcatttccctgttgcctgcactcaggtaacagggaacttatcatcgcaaatgatgcaccacctgattgctgctgccgcgccagatcagggaagggtcttttaaatcctgcacaaatttgccgtcgaccagcacgttaatcaaatcaacaacctgcatttgcgcagcgttgagttcgtcgagtttatagcctgtccacacccagatgtctttacccggacactcggcgcggatgcgttgtaccagtttcagaatatccggcacgttttgcggatgcagcggatcgccgccggagagggaaataccctggcgtttgatacgagtgtcattcagatcgttaatgatctggtcttccattgctttggtaaatggctgaccggaatttacccgccatgtgcttttgttatagcaaccggggcattcatgaacacacccggagacaaacagggtgcaacgagtgccggggccgttgacgatgtcgacaggatagtactgatgataattcattatttcgcctggcttatcagtccgcgtgtaggctgcatccggtaatcaatgcctgatgcgacgctgtcgcgtcttatcagacctggagcaattgccaaatgtaggccggataaggcgtttacgccgcatccggcatttgcttagctcagagtgaagattaacctatctgcccattccccaaatgtttaacgcggcgcttaacttcttcctgcttaccagcgttaaacggacgtgcatccgggctacctaaatatccgcacacgcggcgagttacgctcacacgggaggcgtcatggttaccacatttcgggcaagtgaagcctttgctggtgcactcgaactcaccggtaaagccacactcgtagcactcatcaatcggtgtattggtgccgtaatacggtacatgctgatagctgtaatcccagacatcttccagcgccttcaggttgtgctgaatgtttggatactcgccgtagcaaatgaaaccaccgttcgccagcggcgggtaaggcgcttcaaagtcgatcttgtcgtacgggttcaccttcttctccacatcgaggtggaaactgttggtgtagtaacctttatcggtcacgcccggcaccacgccaaactcagcagtatcgagacggcagaagcgatcgcacaggttttcactcggcgtgctgtagagactgaaaccataacccgtttcttctttccactgatccactgcctgacgcagacgttcaacaatggcgatacctttcgcgcgaagctgctcgttgtcgtaaacatgctcgccgccgaacagcgcgttaatggtttcgtggatgccgatgtaacccaggctaatagacgcacgaccgtttttgaagatttcagaaacatcatcgtcagcattgagacgcacgccacaagcaccttccatatagaggatcggggccacgcgcgctttcacgccttcgagacgagcgatacgggtcatcagcgccttacgtgccagcaccagacgttcatccagcagcttccagaaggtggcttcatcgccttttgcttccagagcaatacgcggcaggttcaggctgatcacgccgaggttgttacgaccatcgtggatctgctcgccgttttcattttcccacacgccgaggaagctgcggcagcccatcggagttttaaagctaccggtgactttcactacctgatcgtagttcaggatatccggatacatgcgcttgcttgcgcactccagcgccagctgtttgatgtcgtagttcggatcgccttttttatggttcaggccatcgcgaatcgcaaacaccagtttcgggaacaccgcagttttacggtttttaccgaggcctgcgatacggttacgcaggatgctttcctgaatcaggcggctttcccagctggtgcccaggccaaaaccaaaggttacaaacggcgtctgaccgttggcggtgtgcagggtgtttacttcgtactccagactctggaaggcatcgtagcactctttgatggttcgagagttagcgtagccttcggcgtccgggatgttccactcttctgcggtcttgcgatgtttgttgtagctggcagtgacaaacggtgccagcacttcatcgatacggttaatggtggtgccgccataaatatggctggcaacctgagcaataatctgcgcagttaccgcggttgccgtagagatgctcttcggcggttcaatctcggcgttccccattttaaagccctgggtcagcatgcctttcaggtcgatcaacatgcagttgaacatcgggaagaacggactgtaatcgagatcgtgatagtgaatatcgccacgctcatgtgcctgcaccacgtcacgcggcagcaggtgctgacgtgcatagtgtttagccacgatcccggccagcaggtcgcgctgggttggaatcaccttgctgtctttgttggcgttttcgttgagtaagctggcgttggtctgctcgaccagaccacggatctcctggttcaggcgaccgcgtttttcacgttcaatgtcgcgatcgtgacggtactcgatgtaagcacgagccagttgtttgtatggaccactcatcagctgattttcaactgcggtctggatctcattgatatccacctggttgcggccctgcatctgctcgctgacaaccgcggcaacagtggcgcaataatcggcatcatcgacttccgctgctttagctgcacgcagaatcgcttctttgatgcgctcacttttaaacggcactttgcagccgtctcgtttcatcacatgcggtgtcatgatcgctccatatttttaagaacaggttatccacagaaattgggaaaggcgttttccggttttttcgtttcgttttccggtgctttccgcaatcgccatccgcttatccacaacgccgcacctttttcgtggggagctgtagtagcaattatagtcgattaatacaacatattgggttgggacgcattttaaagtctatatatagtgctttgcatcaaggatgtttgagctttttttgatgtagctcaaagtaaaaagcagagcgtacggatgacgggcgctacagcgatatgtaaattttttaatgaatttgctggttgaaaaatcaacaaaaacaacatactgacagacaaaaccccggaatgaccggcattaccggggcttagggaagatttacttctgtaaccaccagacagcctcaaaaggccgtaaattcatggcacagggttgtggactggcttcttcgtagttatgcatcacaagctgccagttgccgcgcatttgccctgcctgccagggttggatctcacggctaaggttggcaatgaccagcaaggtttgccccttccattcacggcgatagcaccacaatacagggctgtttggcagcagatcctggtaattgccccatgtcaggatggcttcctgcttacgcagtgcgattaacttttggtaggtgtaaaacacgctggaatcatcggccagcgcggcttctacgttgatttgttgatagttatcgcccaggccaatccacggttcgccagccgtaaacccggcattatcgccgttgctccattgcatgggcgtgcgactgttgtcacgggatttactggcgaggattgccaataactcgtcggcatcacgcccatcgttgcgcagctcggcaaacatattgaggctctctacgtcgcgatagtcagtaatgcgcgtgaaatgcgggttggtcatgccaatctcttcgccctggtagatatacggcgttccctgcatgccatgcagcaccatcgccagcatttttgccgcaggcacgcggtattcaccttcatcaccaaagcgagaaacaatgcgcggctgatcgtggttacaccagaacaaggcattccatgctacgttgtgcattccttgttgccagtggcggaacaatgttttcaacgccacaaagtcaggtttagccagcgtccatttttcaccaccgggataatcgaccttcaggtgatgaaaattaaaggtcatgctcaattcactgcctgtcagagccgcgtatcgctggcaatgctcaaggctggtggaggacatttcacctacggtcattaacccgcgtggcgtaaacacatcgcggttcatctcgtgcaaaaactcgtgtgctcgtggcccgtcggtgtagaagcgacgcccgtcgccgtccaggtcttcagggaaacgcgggtctttggagatcagattcaccacatccaggcgcaacccgtcgaccccacgatcggcccagaactcacagacttttttcagctctgcgcgtaccgctggattctcccagttgagatccgcctgttctggtgcaaagagatgcaaatagtactgttcgctttccgcatgccagcgccacgcactaccgccaaatttactacgccagttgttcggtggcgtttctggttctccatcgcgccagatataaaactggcggtaagggctttctttgttcagcgcctcgcgaaaccaggcatgttgggtagaggtatggttaaacaccatatcgagaatgatacgaatcccgcggctttttgcctgcgtcaccagttcgtcaaaatcgtccagcgtgccgtaggtgggatcaatcgccgtatagttcgctacgtcgtaaccgttatcgacctggggagagacataaaagggggttagccagatggcatcaacgcccagtttatgcagatagtccaggtgttggataacgccacgtaaatcgccggtaccgctacccgtggtgtcctgaaaactctttggataaatctggtagataacgccgttttgccaccagtggggaagatgagtcattacgttattcctgcgaatgcgagggggcgcaattgcgccccgaagaaaattaaacaatgtccagcgtgcccaggcggtatttccgctgatagataaagctggtgagtacaatcgggatgatgatggcgatagccattgccagcgcaaacacctgccagtagctcggttgaatgctgagaattcccggcaggccgcctacgccgatgccattcgccataacgccgttcaggccgcatagcaatcctgccagaccagaaccaatcatcgcgcacagcatcgggaagcgatatttcaggttgatgccgtacattgcaggctcagtgaccccaagccaggcggagatagcggcaggcacggagatctcgcgttcattgtgcttgcggctggaaatgataatgcctatcacggcggagccctgagcgatattgctcagcgcaatcagcggccacactggcgtaccacccatgctttgaatcatctgcaaatcaatagcaagcgtggtctggtgtacaccggtgatcaccagcggggcgtacaggaagccaaacaatgctgcgccaatcggagcaaagctgccggtcatcaggtgacgtaccgcaaaggcaacgccatcgccaatcatgcgaccaaacggaccaatcagcgcatgggcgaggaacaccgcgaggatcaggctacagacgggtaccaccaccagatagaggtaatccggcacgatgcgtttaaggcgagtttcaataacgcccagcgccagtccggctaacagtgccgggatcacctgcgcctgatagcctactttggcgatgctgaacatgccaaagtcccacacttccggcagctgctgcccgagcagataagcgttcatcagctgtggagaaaccagtgtcacgccaagcacgataccaaggatcggcgtgccgcccatttttttcaccgcactccagcaaataccgaccggcaggtagaagaagatcgcttcaccgatcaaccacagaaaatcgtagatcgtttgcagggaagggtacatttgcgccagcgtctgaccgttgctcatgggcaaatcgccgatcacattgcgaaaaccgaggatcaaaccgccgctaatcaacgcgggcagcaacgggaagaagatcaccgcgaaatgagagatcaactgctcatgccatttcatattatgccgggcggctttttttacctgctctttatcaacctgcgcctgtccggtactcgcaatcagtgcttgatagtaatcacccacgttggtgccaatcaccacctgaaattgcccggcattggtgaaacagcctttcaccatagggagttgctcaatttctttcggtctggcattggccggttggttgaggacaaagcgtaggcgagtaatacagtggctcaccgtcgcaatattgccgcgcccgccgaccagttcaatcaaccgatcgatatccgtttggtttattttgctcatcataaagccccatggcagatgacatttttggttggctgcagaatatattgcgcggaaaaatttaaaaacgggaacgttcccgaaacgcagcgaagatcacaatttatcgttcaggaaacgatcaggacagggtggcggggatgatgatttgttgcggttcgctgcgcccggttacctgcgcgatcaactggcaagccgcctggcgtccagcttcggcgtaaccgggatctacggttacgatctccggatggaggaatttcattaacggcgtattaccgacgctcgccagttgcaaggtgtcgatgcgttgctcttgcaggtatttacttgcgccaagtgccagcgtgtcggttgcgcacagtaaggcggtagtttcaggcgtaatcacttttgcaacgttctcatagccttgcttcatagcaagccctggcagggcggcaacgggatgcagtttatgcgctttgcagaacgccaggtaggcttcgtgacgtcgcttaccggttgtcacgtcactgtgcggcacgccgagataactgatattacgatgcccctggtcatacagccgttgcatcaggattttgattgccccttcgtcgtcataacagacgctagcaaagccttttgcgtcacgcgccagcagaaccaggctactctgccagtgggctaacatttcttctgttatgccagtaaaaccgaacagcactacgccgtcgatattacgccgtttcagcactcccaaatgttcggcaactaattgcggggaaaactgactttccatcatgattgggtcgtaaccttgttcatagaacgctggcagcatggtttgaacggcgagattttcactcaagctatccagacgggtaacaatgatggcgaccactttatcgctttgcccacgcatagcgcgcgcagagcgggaaggggaaaatccatgctgattcatcactgcttcaacacgctcgcgggtgagctggctcacgccgctttcgttattcagcacccgggaaactgtagatttccccacgccgcttaagcgcgcgatatctttgatggtcagccgattttgcatcctgttgtcctgtaacgtgttgtttaattatttgagcctaacgttacccgtgcattcagcaatgggtaaagtctggtttatcgttggtttagttgtcagcaggtattatatcgccatagatgctacgaatattattggattctccttattatttgcggcgcttttttcacttaccggaggttatatggaacctgatcccacgcctctccctcgacggagattaaaacttttccggtaagcccgtcttttcacggcgttaccggatgcgtaaggccgtgacgttttaacgtccctgctcagctttattaccttcaggtaaggcttcgccacgcctgaagacatttctgtactgtttcagacagtgcggagggactccttatgtttaaagaaatttttacccggctcattcgccatttaccttcccgtctggttcatcgtgatccattgcctggcgcgcagcagacagtgaatacggtggtcccgccgtccttaagtgcgcattgcctgaaaatggcggtgatgcccgaagaagaattgtggaaaacgttcgacacccatccggaagggttaaatcaggcggaagtggaatctgcccgcgaacaacatggtgaaaataaattacccgcacaacaaccgagcccgtggtgggtacatttatgggtctgctatcgcaacccctttaatattttactcaccattctcggcgctatttcttacgccacggaagatttatttgctgcgggcgttatcgcgctaatggtcgctatttctacgttgctgaactttattcaggaagcacgttccactaaagcggcagatgccctgaaagcgatggtcagcaatactgcgacggtgctgcgcgtaattaacgacaaaggcgaaaatggctggctggagatcccgatcgaccagctggtgcccggcgatattataaaactggcggcgggagatatgatcccggcagatttacgtatcttgcaggcgcgggatctgttcgtcgctcaggcgagcttaaccggtgagtctctgcccgtagaaaaagccgctaccactcgccagccggagcacagcaatccgctggagtgcgacacgctgtgttttatgggcaccaccgtggtgagcggcacggcacaagcaatggtgattgctacaggtgccaatacctggtttggtcaactggcggggcgtgttagtgagcaggaaagcgagccgaatgcctttcagcaagggatcagccgcgtcagtatgctgctgattcgctttatgctggtgatggcaccggtggtgctgttaatcaatggttacaccaaaggcgactggtgggaagcggcgctgtttgcgcttagcgtcgcggtaggcctaacgccggaaatgttgccgatgattgttaccagcacgctggcgcgcggcgcagtaaagctgagcaaacagaaagtgatcgtcaaacatctggatgctattcagaactttggcgcaatggatattctgtgcactgataaaaccggcaccctgacgcaggataaaattgtgctggagaatcataccgatatctccggtaaaaccagcgaacgcgtgctgcatagcgcgtggttgaacagtcattatcagaccggacttaaaaacctgctcgatacagcggtgctcgaaggtacggatgaagagagtgcgcgcagcctggccagtcgttggcaaaaaattgatgagattccgtttgatttcgagcgtcgccggatgagcgtggtagtggcagaaaataccgagcaccatcagctggtttgcaaaggtgcattgcaggaaatcctcaatgtgtgtagccaggtgcgtcacaatggcgagattgtgccgctcgatgacatcatgctgcgtaagattaagcgggttactgatacgctgaatcgtcaggggctgcgcgtggttgcggtggcgacgaaatacctgccagcgcgtgaaggagattaccagcgggcggatgaatccgacctgatcctcgaaggatatattgcttttcttgatccgccaaaagagacaaccgctccggcactgaaggcattaaaagcgagtggaattaccgtaaaaatccttactggcgacagtgagttagttgcagcgaaagtgtgccatgaagtggggctggacgcgggagaggtggtcattggtagtgatattgaaacgctatctgacgacgaactggcaaatcttgcacagcgtaccacgctgtttgcccgcctgacgccgatgcataaagaacgcattgtgaccttactgaagcgcgaagggcatgtggttggctttatgggcgatggtattaatgatgcgcccgccttacgcgctgcggatatcggcatttctgtggacggcgcggtagatattgcccgtgaagcggctgatatcatcctgctggaaaaaagcctgatggtgctggaagagggggttattgagggacgtcgcactttcgccaacatgctgaaatacatcaaaatgacggcgagctctaacttcggtaatgtgttcagcgtgctggtagcgagtgctttcttgcccttcctgccgatgttgccgttacacttgcttattcagaacctgctgtacgatgtgagtcaggtggcgatcccgtttgataacgtcgacgacgagcaaattcaaaagccgcagcgttggaatccggcggatctggggcgctttatgatcttcttcggaccgatcagcagcatcttcgatattttgacgttttgcctgatgtggtgggtattccatgccaacacgccggaaacgcaaacgctgttccagagcggatggtttgtggtgggcttactgagccaaacgctgattgtgcatatgatccgcacccgccgtgtgccgtttattcagagctgtgcaagctggccgttaatgatcatgaccgtgatcgtgatgattgtcgggatcgcattgccgtttagtccgctggccagttatctgcaattacaggcgctgccgttaagctatttcccgtggctggttgcgattctggcagggtatatgacattaacccagttggtgaaagggttctatagccgtcgttacggctggcaataaagaataaactgggcacgatagccccgattcagattgtagacaaagtgagttttgttcatgccggatgcggcgtaaatgccttatccggccaacaaattcaataaattgcaggaatcacgtaggcctgataagcgtagcgcatcaggcgattttgcgtttgtcatcagacttaatccgggcatgatagcccggatttccatcaagattagcgacgaacagcgatcgcttcgatctcaatcttcacgtctttcggcagacgggcaacttcaacgcaagaacgtgccgggaaggtggcgttgtgttcggtgaagaaggcttcgtaagtggcgtttacggttgcgaagtcgttcagatcttttacaaacacggtagttttaacgatgtcgcccactttcaggccagcggcttcgacgatcgcttttacgttatccaggctctgacgtgcctgtgcagcgacgtctgccggtacttcgcccgttttcggatttaccgggatctgaccggaggtgatgatcatattgcccagatcaacgccctgtacgtaaggaccgatagctgccggtgcattttccgtcgcgatagttttgctcatgatttctcctttattacagcggtaaaaagtctggctcattatagggagccagacttttattaccaaccgcaattaattggccagcaccacattatgggaaaactctttttcacagtatttgcatttgagcgcgatatcattggcgcgttttcgcacggcaaagctggaactaaccggttcggcatggctgatacagttgctgttcgggcagaccagcacattgtcgatgcgctccggcagacttgggcggcttttacccaccacttcatagttgtcgatacggttaaccgtggcttgcggcgcatacaatgccagttgatctacttgatcttcactcaaaaaggtattttcgattttgatcagatctttgcggcccatctcgccagaaggcaggttcagaccaatggtgatgcgctgatccgtttcggtcagcttgaacagactcaacagcttaaaaccgatctgggcggggatatggtcaattaccgtgccgcgtttaatagcttcaacctgcaatttattatcgtgtgtcatctctatttccccttacagtaccagatcgcgattcagaaccagtgccagtaacgcctggcgagcgaaaatcccgttgcctgcctgctggaagtaccaggcgtgtggcgttttatcaacatccgtcgcaatctcatcaacacgcggcagcggatgcagcactttcatattggctttggcgttgtggagatcgctggcgcgaagaacaaactgcgctttcacgttggcgtactcggacgggtccagacgctctttttgcacgcgggtcatgtacaggatgtctacttccgccatcacttcttcaatagagctgtgcagactccatgcgatccctttttcatcgagcatatccagaatgtattgcggcattgccagcgcgtccggcgcgatgaagtaaaaacggttgccgtcgaacttcgctaacgcctgagtcagggagtgaacggtgcggccatatttcaggtcaccaaccattgcgacgtggagattgtccagacgcccctgggtttcctgaatagtgaataagtccagcaaggtttgcgtcggatgttggttggagccatcaccggcattcagtaccggtacattgccggaaaactcggtggccaggcgcgccgcaccttcctgcggatgacgcatcactatcgcatcgacgtaagtgctgataacgctaatggtatcggccagcgtttcgccctttttacccagacttgtattggcgctgtcggagaagcccaccacgctggcccccaggcggtgcatagatgtttcgaaagagaggcgggtacgggtagaggcttcgaagaaacagctggcaatgactttgtgcttcaacagctctggttgcgggtttgctttcagtttcgccgctgtcgccagcaccagattaaggtcatcgcgactaaggtcgtttatggaaatgatatgtttctgatatagcggattagccatcttttatctcctgacgcctgggcaaaaaaaagcccctcgattgaggggctgggaatgggtgatcaacgggaagaaaaacggcaggccagcgtcttttttcagacgcggtaagacaaaatgtcgaacacactgaaccatacatcctcccggcaaattgtccggcattatactcatcgtcagaagcggcgcaagcatttgatgcaatattttgtcagcgcaaacggtttatttgaattaaaagtcaaggtatatgcatttttatttgatgtgattctgcaggggaactgtccttcggtatcaataattgcagacattccctgctttttcctttttcactttcacgcaatcagatatgcattttattccattcatccgacttatagggcggagtgtgaaagcgaacggctaacactattgcttactgctcagggatgcgcgctatcactttaatttcaaaatcaaagcctgccagccatgtaacacccaccgccgtccagtttggataaggtggggcgctaaatatttcatttttcaccgtcatgatgtcttcaaattggttttctggatcggtatggaagctcgtaacatcaatgatatcgtcaaaagtgcatcccgcagctgccagggtcgcatgcaaattatcaaatgccagtctgacttgttgctgaaaatcgggttctggtgttccgtcctctcgacttcctacttgcccggaaacaaacagcaaatcgccggaacgaatagccgcagaataacgatgctcagcatatagactatgtcggccagcagggaaaacagcggttctttctaccatttggttatcctcaagatttacgacatgaacagaagatttctctttaccgggagccgcttttagcggacgacgtgagtaaacaaaacccagacatcatggataatggctgggcttaattgagcgtagtcggttatgcgccaaacgcgccatcaatggtatgcatcgcgccggtaacaaaactggcttctggccctgctaaccatgcgaccataccagcgacctcttccggttgcccatgtcttttgatagccatcaaactatgcaacatatcgcgcattggcccgttggcgggattagcgtcggtatcaattggccctggctggacgacgttaatggtgatcccacgcggtccaaaatcacgggccagcccgcgcgccatgccttgcagggcagatttgctggcggcataagcagccatgcctgcaacaggcatacgatcgccattcacggagccgatgattaagatgcgcccgccttcgggcatctgccgggcggcttcaacagaggcatgataaggagcatgaatattgattttgaaaaggcgatcaatatcgtcggcatttaattccagggcctcgccaaagacgccaatacctgcatttaccaccaggatatccaatgcgccgctcttacgaacgacatcaatgacagcgtctctgtcagcactatctgtgaatactgctgtcgctccagtctcttgtgccaggcgtttagcggcatctttgctccccgcataggtgaatcgtacattggccccatcggtgacgaaacgacgtacgatagcggcaccgataccacgactgccaccgaggatgagaactgtcttacctgtaaaagcgcccataaggactccttgatttattatgtaacatgcattacaaaactgttttaactttctgtcaacaggttttgtaatggtcactaaaaaacaatctcgcgttccaggtcgtcccagacgtttcgctcctgagcaggcaatctctgcggcaaaagtgctttttcaccaaaaaggtttcgatgctgtcagtgttgctgaagttactgattatcttggtattaaccccccgagcctctacgcggcttttggcagtaaagctgggttatttagccgtgtactcaatgaatacgtcggtacggaagctattccgcttgccgatattcttcgtgatgatcgtccggtaggcgagtgcctggttgaggtattaaaagaagcggcgcgcagatatagccaaaacggcggctgcgctggctgtatggttcttgaaggtattcatagtcatgatccacaagcgcgtgatattgccgttcaatattatcacgccgcagaaacgaccatttatgactacatcgccaggcggcatccacaacgcgcacaatgtgtgactgattttatgagtaccgtgatgtctgggctttctgcgaaggcacgagaggggcactctatagaacaactctgtgcaacagctgcaatggcgggggaagcgataaaaactattcttgaggagtgatgcgggccttgacccgaaaggcgggaaagcgcctgccgataagttgtgataagacaataattcacgcgttaaggctagcggaattgattatcttttcgtataacgatagaaatgaaacgttgttttaattaaggagtggaaaagatgatcatcggaaatattcataatcttcagccgtggctaccccaggagttacgccaggcgattgagcatatcaaagcacacgttacggcagaaacgccaaagggcaagcacgatatcgaaggcaatcgactgttttatcttatcagcgaagatatgaccgagccgtacgaagctcgccgtgcggagtaccatgcccgctatcttgacattcagattgtgttaaaaggtcaggaaggcatgaccttcagcacgcaacctgcaggcgcgccggataccgactggttagctgataaagacatcgcatttttgccggaaggcgttgatgagaaaacagttattctaaatgaaggtgattttgttgtgttttatccgggggaagtgcataaaccgctgtgcgcagtgggcgcgccagcccaggttcgcaaagcagtagtgaagatgctgatggcgtgatgacttttcgccgtaaataactcaaggtttacggcgagtttgtgaaaagagcgttttttgatatttttttgtgagtaaaatttgtaatgcttagacgttcttattcactcaaggagttcgtcatgagcaaaataagtgatttaaattattctcaacacattacattagccgacaattttaaacaaaaaagtgaagttttaaatacctggcgtgttggaatgaatgattttgcccgtattgccggggggcaggataacagaaggaatattctttctcctggagcatttttagagtttttggcaaagatatttaccctgggttatgtggattttagcaaacgctccaacgaagcgggtagaaatatgatggctcatattaagtccagttcttattctaaagatactaatggcaatgaaaaaatgaagttttacatgaataatcctgtaggggaacgagcggatagtcccaaggtgattatagaaattagtctttccactatcactactatggggactcgtcaaggacatacagccattatatttccacaacctgatggtagcactaaccgttatgaagggaagtcctttgaaagaaaagatgagagtagtttacacctgattactaacaaggttctggcgtgttaccaaagtgaagctaacaagaaaatagcgcgtctattaaataataatcaggagttaaataatctacagaaattaaataatctacagaagttaaataatctactgaagttaaataatatacaggggttaaataatcctcaggagttaaataatccgcagaatttaaatgattctcaggagttaaataacagccaggaattaaatagtccacaggagttaaatgatccgcaggagttaaataattctcaggacttaaataactctaaggtgagttgtacagttagtgttgattctacgattacgggtttattaaaagaaccattgaataatgcattattagcaataaggaacgaacatctgctattaatgcctcatgtatgtgatgaaagcattagttacttactgggcgaaaaaggtatacttgaagaaatagataagctctacgcattaaatgatcacggaattgataatgacaaagtaggtaacaatgaaattaatgacatcaaagttaacctgtctcatattcttattgattccttagatgatgcaaaggttaaccttacaccggtcatcgatagcattctggagacttttagtaaatccccatatattaatgatgtaagaatactggattggtgttttaataaaagcatgcaatattttgatgatactaaaaagataaagcatgcatgctccgtaataaatcatattaatcttcgcagcgatcagtctaaaatagctgagacattatttttcaatctcgataaagaaccctataaaaatagccctgaattacaggggttgatttggaataagttggttgtatatgtcaatgaatttaacttaagtaatcgagaaaaaacaaatttaatacaaaggctatttgataatgttgagtctatatttaatgaagtacctgtcagcattttagtgaatgatatttttatgaatgatttctttatgaaaaatcctgagatgattaattggtacttccctcagttacttaagagttatgagggtgaaaagatttattttgataatttaaaatatgatttaaatgataatgataaggaatctaataaagaaattttgaagaatcaaccagataatgttatcaaagaaaaactgaataatgaatacaaacttagatttagaatgatgcaaactatcttgcaaagcagagttaatgtattaccatatattaatgaacagcgtttaaataaactaaatccaccggaaaatttacgtatagcaatagaacactttgggtggaagaatagacctatcactgcataaaataatgtgatgccgggatggtttgtatttcccggcatctttatagcgatagcaattatttactgagcgtcgcgaccatcaccgctttgatagtatgcatacggttttccgcctgatcaaaaacaatgctggcggcagattcgaagacctcatcagtgacttccataccgccatgtaggccaaattcttccgccattttcttgccaagcgtcgtttggtcgtcatgaaacgcgggcaggcagtggaggaatttgacctccgggttaccggtcaactgcatcatcttgctgttcacctgatattcacgcagcaatgcaatccgttccgcccatttctcttttgcttcccccatgctcacccacacatcggtatagataaagtcagcaccttcaactcccttcgcgacatcttcagtcagcgtaatattcccaccattttgctgtgccagggcgcggcattccgtaaccagcgcagcttccggccagcacgcttgtggcgcgaccagacgcaaatccagaccggtaagcgccgcagcttcgagcatgctattgcccatgttgttacgcgcgtcacctgcatagaccagcgtcatttcgttgaacgctttgccgggcaaatgctcctgcatggtgagaagatccgccagcagctgcgtgggatggaactcattggtcaggccattccataccggcacgctagcgtattccgccagtgtttcgacaatctcctgaccatagccgcgatactgaataccgtcatacatgcgaccaagcacgcgggcagtgtctttaatgctctctttatgaccaatctggctgccgcttgggccgagataagtaacgcgagcaccctggtcatatgcggcaacttcgaaagagcatcgggtacgagtgctgtctttttcgaagatgagcgcgatgtttttaccagtgagtttggcttcttctttaccgcttttcttatcggctttcagcttcgcggctaactgcagcaggctgttgagttcagctggcgtgaaatcgagtaatttcaggaaatgcttatgataaaacccggacatagatccctcctgtggctaacgcctcaatgaattaaaattcaatttatatggatgattattcatttgcaagtctaaagcataaatctttgtcacaaaggtggaggcaatgtcagtggtgtgtgacaataagagtatcggcaggacattaagaggaatgagccatggcaaacccggaacaactggaagaacagcgtgaagaaacacgtttgattattgaagaattactggaagatggcagcgatccggacgcgctgtacaccatcgaacaccatctttccgcagacgatctggaaaccctggaaaaagcagcagttgaagcgtttaaactcggttacgaagtgaccgatccagaagagctggaagttgaagatggtgatatcgtgatttgctgcgacatcctcagcgagtgcgcgttgaatgccgatctgatcgatgcccaggttgaacaactgatgacgctggcagagaaatttgacgttgagtacgacggatggggcacttactttgaagatcctaacggcgaagatggcgacgatgaagattttgtcgatgaagacgatgacggagttcgccactaattaagcgtagcgcatcaggcccaggtagttcctgcaacctggtgaatttgtagcccggataaggcattcatgtcacatccggcataaacaaaacgtacgttgttaatgttcgaatgcccgcgagttgaacacgcgggcatttttttagagttcgcgcaacatccgcacttcacaatcgacatggcccgtgcagccaagcgcatagtcgatatgctcaaagcccaaatgctcataaagcgcaatggcttcctttaaaaaagcggtcgtttccagatagcagcgtttgaaacccatctctcgcgcctgctccatcgccattaaggccagtttttttgccagccctttgccgcggatagccggaagaaaatacatcttttgcagttcgcaaatatcgctctcactcccggttaatggcgctatcccaccgccgccgaccacttcaccctcgtactcaacgacccaatatgcatggccaggctgactatatacttgatacagctcgtcaagattcggatcggcgacggtgtagcctttatcagcggtaagaccgtattcggcggatacctgacgaatgacgcgggcgatagcaggattatcctgcagcgtcaggcgacgcattacaggactttgcggcgcaatgttattcatagtttaacccaataaaaataaagtaattatacatttgtttaataccactctcttcttacgtacgcaagcgacttataaagtaataaagtttttgccagcctattactgataagagtattgtaacgtggcagaacattttactgtctgtatatataagttatatcaatggattttttaattcagggaatttttatggctcaagttattaatgaaatggatgttccgtcccatagctttgtttttcatggtacaggtgagagatattttcttatttgtgtggtgaatgtgttgttaacgattataacgctaggtatctatttaccatgggcattaatgaaatgtaagcgttatctttatgctaatatggaagttaacggacaacgattttcttatggaattaccggtgggaatgtttttgttagttgtcttttttttgtttttttctatttcgcaatcttaatgacagtgagtgcagatatgccgcttgttggttgtgttttgactttgttactgttggttttgcttatatttatggcagcaaaaggactgcgtcatcaggccttaatgaccagtctcaacggcgtaagatttagttttaattgctctatgaaagggttctggtgggtgacctttttcttgccgattttaatggccattgggatggggactgttttctttatcagcacaaagatgctacctgccaatagtagtagtagtgttattatatccatggttctgatggcaatagttggtattgtttccattggtatttttaatggtactttatatagtctggtaatgagttttctctggagtaataccagtttcggtatacatcgtttcaaggtgaaattagatactacgtattgtataaaatatgccattctcgcatttttagctttattgccttttctcgctgttgctggttatattatcttcgatcaaatattaaatgcgtatgatagttctgtatatgcaaatgatgacattgagaatttacagcaatttatggaaatgcaacgtaaaatgataatcgcgcagttaatctattattttgggattgctgttagcacaagttatttaacggtgtctttgcgaaaccattttatgagcaacctgagtctgaatgatgggcgtattcgttttcgcttaactttaacgtaccacggtatgctttatcgcatgtgtgcgttggtggtgatatccgggattacgggcggtctggcttatccactgctgaaaatatggatgattgactggcaggcaaaaaatacgtatttgctgggcgatttggatgaccttcctttaatcaataaagaagaacaaccagataaaggcttcttagccagtattagtcggggagttatgccttctttaccatttctgtaagagataaaaaaggccggagcatgctccggccttcgttttcatcactgtgttttgattacagcgcggcgataacagcctgctgttcaatcagtttcgctttcgcttccgcatagccttccagcttctcacgctctttcgcgatgaccgcttccggtgcgcgggcgacaaagccttcgttcgccagtttgttctcgatacggctgatttcaccttcaatcttcgccacttctttcgccagacgcgccagctcatcttctttgttgatgaggccagccatcgggatcagcagctctgcaccgtcgatgatcttcgtaacggaaaccggacctttgtcatcggcaggcagcacggtgatactttccagacgcgccagggtttgcaggaagccacggttttcatttacgcgacgttctgcatccgcgctgcaaccacgcagcagcagctccagcggtttgcccggcgcgatgttcatttctgcacggatgttacgtaccgcaacgatcgcctgtttcagccattcggtgtcggccagtgcggcttcatcaacctgagatgcatcgtactgcgggaacggctgcagcatgatggtgtcggcagtgataccgcaaagtactttcacacgctgccagatggtttcggtgatgaacggaatgatcggatgcgcgaggcgcagcagaccttccagtacagtcaccagcgtatggcgagtaccgcgcagttctgcttcggtgccaccgttcattaccggcttggtcagctcgagataccagtcacagaactggttccaggtgaactcatacagaatgcctgcggcgatatcgaagcggaagctgtccagcgcttcgcggtacgctttgatggtctggttgaactccgccagaatccagcggtccgccaggctcagcgtcatttcgccgccgttgaagccgcaatcctgaccttctgtgttcatcagcacaaagcggctggcgttccacagcttgttacagaagttacggtaaccttccagacgcttcatatcccagttgatgtcacgaccggtagacgccagcgccgccagggtgaagcgcagcgcgtcagtaccgtgcggctcaataccgttcgggaactgcttctcggtgcgcttacggattttgtccgccagctgcggctgcatcatattgccggtacgtttttccagcagttctggcaggctaataccgtcaaccatatccagtgggtcgataacgttacccttggatttggacatcttctggccttcgtcatcacgaatcaggccggtcatgtaaacggtgtggaacggcacctgcggtttgccattttcatctttgatgaagtgcatggtcatcatgatcatgcgggcaatccagaagaaaatgatgtcgaaaccagataccatcacgctggttgggtggaactgacgcagggcgtcggtattttccggccagccaagggtagagaaggtccacagcgcagaagagaaccaggtatcgagaacgtcttcgtcctgacgcaggacaacatcagcaccgaggttattttctttacgcacttcgtcttcgttgcggccaacataaacgttacccgcttcgtcataccatgccgggatacggtgaccccaccacaactgacgagagatacaccagtcctgaatatcgcgcatccaggagaagtacatgttttcgtactgcttcggtacgaactgaatgtcgccgttctcaaccgcttcaaccgccggtttcgccaggacatcggcacgcacgtaccactggtcggtcagcattggttcgataactacgccgccacggtcgccgtaaggaacggtcaggtcgtgcggtttaatttcttccagcaggccaagcgcgtcaactgcggcaacgactgctttacgtgcagcaaaacgctccagtttctggaactctgcagggatttcgctggaataaacgtcagattcgttacctttggtatcgaacacctgggcgctttcacggatatcgccgtcaaaggtcaggatgttgatcatcggcagggcgtgacgtttacccacttcatagtcgttaaagtcgtgcgccggagtgattttcacgcagccggtgcctttttccatgtcggcgtgttcgtcgccaacgatcggaatacgacggttaaccagcggcagaatgacatatttgccaatcagatctttgtaacgcggatcttccgggttaacggctacgccagtatcgcccagcagggtttctggacgggtagtcgcgaccaccagataatctttaccgtctgcggttttcgcaccgtcagccagcggatagcggatgtgccacatgctacctttgctttcgcggttttcgacttccaggtcagagatagcggtgcgcagtttcggatcccagtttaccaggcgtttgccacggtaaatcaggtcttctttatacagacgaacgaaaacttctttcaccgcattggacaggccttcgtccatggtgaagcgttcacgctcccagtcgacggagttgccgagacggcgcatctgacgggtaatggtgccgccagattccgctttccattcccagattttgtcgatgaaagcttcgcggccgtagtcgtgacgggttttaccttcttctgcggcaatcttgcgctcaacgaccatctgggtagcgatcccggcgtggtcagtaccgacctgccacagggtgtttttgccctgcatgcgctgatagcggatcatggtatccatgatggtttgctggaaggcgtgacccatatgcaaactgccggtgacgttcggcggcgggatcatgatgcagaaactttcctggctttcatcgccattaggcttaaagtagccctgcttttcccagtgctcgtaaagcggctgttcgatatcttgtgggttatatgtcttttccattatttccaggttgccgtattcaggttgaaaccagccacgcggtaggctttatagcgttcgcgcgccagttgtttcagagaatcttcataaggaacgaagtctaccacttctgtgaaagcggtggcaaaatctgcaaagcttgttcgcagactaatcaatatatcgcgccggctgctgctacgcttttgcggccaggcgatctccaccggtgcaccgccgcgcggtccttctcccgctaaattatgcggaacaaagctttctgccggacgcgcccacagggcttcatccagccggtaagcctgcttttcatcttcacaggcgatgagcacgcgcttaccgctgcgccaacgttctgcggcaatttcacacaccagttgctcaacggcgcttaagccatcgacggtggtgtcattgtccagaaggtagaacgtcgcgtttttcataaatggggcttcttgtggtggatttaaatacgcatcaggtatacaccgcagcgcctgatgcgacgctgttgtgtcttatcaggcctacgagttcagtgctgtgtaggtcggataaggcgttcacgccgcatccggcaataacagccttgcctgacgcaattactcttcgccgttaaacccagcgcggtttaacaggaactgtgccagcaacgctaccggacgaccggtggcgccttttgctttaccagaacgccaggcggtaccggcgatatccaggtgcgcccagttgtacttacgggtaaagcgactcaggaagcaacctgcggtaatcgccccaccaggacgaccgccaatgttcgccatatcggcaaaattggactccagttgttcctgatactcgtcacccagcggtaagcgccatgcgcggtcaccggattgttcagacgcggcaatcagttcatgggccagcggattatggttcgccatcagaccagtaatatgatgacccagcgcgatcacgcaggcaccggtcagcgtcgccacgtcaatcaccgcttccggctcaaaacgctcaacgtaagttaacacgtcgcacagtaccaggcggccttcagcgtcggtgttcagcacttcaacggtttgaccggacatggtggttaacacatcgcccggacgataggctcgtccgccaggcatgttttcgcagcctgccaacacgccgataacgttaatcggcagttgtagctccgcgaccatccgcatcacgccgtaaaccgctgccgcaccgcacatatcgtacttcatctcatccatgccttcactaggcttgatgctgataccgccggagtcgaaggttaaacctttacccaccagcacgattgggcgtgcatcttcgctcgcgttgcctttgtactcaatcacgctcatcaggctttcgttttggctaccctgaccgaccgccagataggaatgcatccccagctctttcatctgctgttcgccgataacgcgggtgatgacattcttgctgtagctgtcagccagctggcgcgcttgactagcgaggtaagcggcgttacagatattcggcggcatattgccgagatcttttgctgctttaatcccggcggcaatcgccagaccgtgctggatcgcgcgctcaccgctggtcagttcacggcgggtcggcacgttgaacaccatcttacgcagcggacgacgcggttcgctcttgttcgttttcagctgatcgaaactgtagagcgtctcttttgccgtctcgacagcctgacgcactttccagtagttgttacggcctttaacgtgcagctcagtcagaaagcagaccgcttccatactgccagtatcattcagcgtattaatggttttctgaataacctgcttgtactgacgctcatccagctcacgttctttgccgcaaccaataaggagaattcgctcggaaagtacattcggaacatggtgcagcaacaatgtctgccccggttttccttccagttcgccccgacgtagcagggcgctgatgtacccatcgctgattttatcgagctgttctgcaatcggagaaaggcgacgtggttcgaagacgcccacgacgatgcaggaactccgctgtttctccgggctaccgctttttacactaaactccatgcactacgctcctgaatcttaaagacaacggcggtggctacagatagaattgcaagctttcgtaactcatgtccgctgttgcgatgacttcgtgttaatcttaacgttattacggcattggcacgtcagaacaaaatctgagaggtgaatccgttgagtataattatcttagcgacgatttcgacgactcaagagaataaatgacgtttaagccatgaaacaagctaaaatcctgcaaaagacgagtttttacgggcgtatttaaagtgataatcataagatatctggtgcgggagacgctcaaaagccagctggcgatactcttcatcttgcttttgatcttcttctgtcaaaagttagtgaggatcctcggcgcagcggttgacggcgatattccggcgaatctggtgctctcccttctcgggttgggcgtgccggaaatggcgcagcttatcctgccattaagcctgttcctcgggctgctgatgacgctgggcaaactgtataccgaaagtgaaattacggtaatgcatgcctgcggcctgagcaaagcggttctggtgaaagcggcaatgatccttgcggtattcacggcaatcgtagcggcggttaacgtgatgtgggcgggaccgtggagtagccgtcatcaggatgaagtgttagcagaagcgaaagcgaaccctggcatggcggcgctggcgcaagggcaattccagcaagcgactaatggcagcagcgtgctgttcatcgaaagcgttgacggcagcgatttcaaagatgtgttcctcgcgcaaattcgaccaaaaggtaatgcacgtccttctgtggtggtggccgattccggacatttaacccagctgcgcgacggctcccaggtcgtcactctcaaccagggaacgcgcttcgaaggcactgcattgttacgtgatttccgcattacggacttccaggattatcaggcgatcattggtcaccaggcggtggcgctcgacccgaacgataccgaccagatggacatgcgcacattgtggaacactgacaccgatcgtgctcgcgcagaactgaactggcgtatcacgttggtattcaccgtgtttatgatggcacttatggtcgtaccgctgagcgtggttaacccacgtcagggacgcgtactgagcatgctgccagccatgctgctgtatctacttttcttcctgatccagacctccctgaaaagcaacggcggtaaaggtaagctggacccgacgctgtggatgtggaccgttaacctgatttatctggctttagcgattgttctcaacctttgggacaccgtgccggtccgccgcctgcgcgccagttttagccgtaaaggagcggtgtgatgcaaccttttggcgtacttgaccgctatatcggtaaaactattttcaccaccatcatgatgacactgttcatgctggtgagcctgagcggcattatcaagtttgtcgatcagctgaaaaaagccgggcaggggagttacgacgcgttaggcgcaggaatgtataccttgctgagcgtgccgaaagatgtgcagatcttcttcccgatggcggctctgcttggggcgttgcttggtcttgggatgctggcgcagcgcagcgaactggtggtgatgcaggcttctggttttacccgtatgcaggtggcgctgagcgtgatgaaaaccgccattccgctggtcttgctgacgatggcgattggcgaatgggtcgcgccgcagggcgagcagatggcgcgtaactaccgtgcgcaggcgatgtacggcggcagcttgctctctacccagcaaggcttatgggcgaaagatggcaacaacttcgtctacattgagcgggttaaaggtgacgaagagttaggtggcatcagcatttatgcctttaacgagaatcgtcgtctgcaatccgtacgctatgccgctactgcgaagtttgacccggaacataaagtctggcgtctgagccaggttgatgaatctgatctgaccaatccgaaacagattaccggtagccagacggtgagcggcacctggaaaaccaacctcacgccggacaaactgggcgtggtggcgctggacccggatgcactctctatcagcggtttgcacaactatgtgaagtatctgaagagcagcggtcaggatgccggacgttatcagctcaacatgtggagcaaaatcttccagccgctatctgtggcggtgatgatgctgatggcgctgagcttcatctttggcccactgcgtagcgtaccgatgggcgtgcgtgtggtcaccggtatcagtttcggttttgtcttctacgtactggaccagatcttcggcccgctgacgttggtttatggcatcccgccgatcatcggcgcactgttgccaagcgccagcttcttcttaatcagcctgtggctgttaatgagaaaaagctaaccgaatgaacgaataaagggagcgaaagctccctttattattgttagcaaagtgtgcttcgttcattcctgaaaaataattaaaattcaatatattgcagtggggtgggcatgataagacgcgccagcgtcgcatcaggcaaagacaaatctcgcctgacttaccttcttctcccccccagcaaactccccaacatcccgcgtacaatctgattcgtcacttggcgagcggcgcttttggccattgtttgcaccacaccatctttcttcccgccgcgtggtccggtagtgccgaacaaaatatccttcaatccaccaagaatgccgtcatccaccgctacctctttccctttcgcgggaggattattttgctgctcggtactggcctgaaagcctttttgcaacatctcataggcggattcccggtccacctcatcctcatatttgccatacaccggagagtgattaatcaagccattacgctcatcttccgtcaccggccccatccggctacaaggcgcgatcaccatcgcacgctccaccacagaagggcttcctttcgcatccagaaaagagatcaacgcctcgccggtgcccagttcctgaatcgccttttcggtatcaaacgccggattggcccgcatggtttgcgccgctgccttcactgctttctgatcttttggcgtaaaagcccgcaaagcatgttgaacgcgattaccgagctgcccgagcacattatccggaatatcagacgggttttggctaacgaaccagacgcccacgcctttactgcgaataagccttatcacctgctcaatcttatccagcagtacctgcggggcatcgttaaacagcagatgtgcctcgtcgaagaaaaacaccagttttggtttctccagatcgcccgcttccggcaattgttcatacaactcactaagcatccacagcaggctggcggcgtacagtttcggcatctgataaagtttctcggcgctgaggatattgataacgcctttaccgttggcatcggtgcgcatccagtctttgatatccagcatcggctcaccaaagaagtgtgctgcgccttgctgttccaggctcaacagcccgcgctggatggcaccaacgcttgcgctactgatattaccgtactgattctggaaggatttggcgttatcgccgatgtactgggtaattgcccgcagatctttaaagtcgagcagtaacagcccctgatcgtcagcaatgcggaagatgatattcagcacgccagattgcacatcgttgagattcaacagtcgtgccagcaacagcggccccagatcgctaaccgtcgcccgcaccggatggcctttctcgccaaagatatcccacaccaccaccggattggcatgcggttgccagtcattgacgccgatatttttaagccttgcgagcagtttttcgctcaccgttcctgcctgcgcgacgccggtcagatcgcctttcacatcagccataaacaccggcacgccgatttcgctcaaactctccgccagtttttgcagcgtaacggttttacccgtccccgttgcgccggtaatcagcccatgacggttagccattcccggcagtaaaaacagttctgtgtccggcgtgcgggcaattaacaggggttcactcatgagatatcctccagtttcctgcctggagtataggcaacgtccggcaaagagaatacgtgtaatgaagagaaaataacttaaagcgtgttgccgtgataaatctgatacccgaggtcaacagtgttgtggttgtgatcgttatttttaattttgctcagcaacatttgggcggccatccgaccaatatcaaaacggggagtaattacgctggcgaggcttgggatcatttgcctgccaatctccagcccatgaaaacccgcaatggaaatttgttctggcacggcgaggtttcgctcgcggcacagcagaagcgcacccatcgcaatatcgtcattggtgcaaaatacaccgtctaaatccgggtttgcgctaagggcatcacgcattaactgcattcctaaatgaatggaactgatggcgcgtggattcatgcgtaatggggaaagattatgcagcatcatcgcatcgcaatacccctgataacgctgttcatcgcgggtgtcatctttggaaccgagatacagaattttgtgcctgactcgcttctccagcatggtacacaccatgtcaaaagcggcctgccgattatcaaaaccgacctccatatccagccgttctccctgtacatccatcaattccacgaccggaatggtggcactacgcagaaatttcaccgtcctgatggtgtgatatttttcgctaagtataatcccgtcaatgttataagagagcaggttaatcacgctctcttcttcggaatcgcgatcgtaattgtaattagcaataagggtctgataattatgctcagaggtgacggattctattcccgcgagaatgtcagcgaagagttgattttgaaaactcggaatcaagataccgagggtataactttgtgcattcaacaacatgccgggagcgcgattagggatataattgatctcttccataattttggcgatgcgctcgcctgtttcctttgccacctttttcgggctgcggatataacgactcacggtcatttttgttacgccagccagcgtagcgatatcctgtaaagaaattctgtgattgcgcataacttctcccaacgtcgggggaatcttcaatcttcccccgaaactacatcacaatattttattctttcagtgcaatacggcgttaatggctaacacgcccagcaaacccataatagaaataagggtttccatcaccgtccaggtacgcaacgtttcaccaaccgtcagattaaaataccctttaaatagccagaagccagggtcgtttacgtgactcgcgatcacgctgcccgcaccggttgccagtaccattaaagcgggatcggcatgggtaacgttgataatcggcaacaccacacccgcggtggtaatggccgcgacggtggcagagcccagagcgatacgcaacagcgccgcaacagtccagcacatcaataacgggctaagtgtagttccggtcattaagtgactaatatagtgcccgacaccgctatctactaatacctgcttaaacgcgccgccgccagcgataataaacacaatcatcgcgatagcgcctatagaatccccaatgatatccatgatttgctcgatggtgcgtccattacgtcggcccagtgtgaaaatcgcaataacaatggcaataaacagcgcaacggcagggttaccgacaaattcaaagaagaggcgcacggtgttagttttcggtaacgtaatttcacaaacggcggcgatagccatcaggatgaccgggatcacggcagcgaaaatactgttccagaaggagggcatctcctcttcgctaaacagatgaggattaaataagccttccggtggtgctttctcaaagcgagttagcagtttagaaaacagcggtcctgcgacaataactgtcggaatggtaatgataaatccatacagtaaagtcgttccgagattagcctcaaagatagtcgcgatggcagtaggccctggatgtggcggcagaaaacagtgggttacagagagcgctgctaccattggtacgccaacatacaacaggggtaatccactacttgctacgatggtaaataccaacggcaacagcaggacaaaacccacttcaaaaaacatggcgaggcccacaaccagaccggtgatcactagcgcccattgcacgcgttttttaccaaaagtagcaatcagcgtagtggcgatacgttgtgccgcacccgtatcagaaatcagcttgcctaacatggccccgaaaccgaggatcattgccagcccgccgagcgtgctgccgataccattttgtatagagtgcaggacggcctgtgcatccatcccttcggcaaatccgacgacggcagctaccagaacgagggcaataaagccgttaactttaaagccgatcatcaggataagaagcagcgcgacgcctgccgcaataatgattaatggcatagtctttatctcttattagtgccagaaaagcagcgctttcgcgctgcacgtaggggggctgttaaacagccactaacatgccgccatcaacaaacaacaggtggccgtttacgaaatcagaggctttactagaaaggaacaccgcagcaccaatcagttcctgcggatctccccagcgtgcggcgggggtccgtttgcacaaccaggcggtgaaggcttcgtcctcaaccagtgctttagtcatttctgttttgaaatagcccggcgcaataccgttgacctgaatattgtggcgcgccagctcgacgcacatgccgcgggtgagcatttttaccgcccctttgcttgcggcataaggggtgatggtgtcacgtcccagttcgctttgcatgctgcaaatattaataactttacctgccttgcgttcaaccatgtgacgagttaccgcttggcttaccaggaacacggcggtctggtttactgcgatcacatcattccactcttgttcagggaactcagtaaaaggatgacggcgctggataccggcgttattcaccagcacatcaatggggccgatgtccttttcgatatgttcaacggcggcatcaatttcatgtttatgagtaacattaaaaggtgcggcaacggcctgaataccctcctggtggagtttttctacagcaagttctgcgcgttcggcagtaatatcattaataattatttgtgcgccatatttacccaggccggttgccagtaaaaagccaatgccctgtgcactaccggtaatcaagatattttttcctgccagactaaatagatcgttcattgtattattcctttatttatctcttagaaaacaagctggacttttgctgcctgggttttatcaccggcgaaacgtagcgcctcttccaggtcagtgaagggatattcagcactcagtaaaggcagtggattgataacgccattcgccagccaactcactgcggtattaaattcgctggtaaaacggaaagagcctctgagactaatctccttaccaatcaacgtcatcattgggaattctgccatcgcgcctcccatacctacctgcaccattacgccgcgtgcacgagtgacctccagacaggtattcacactactaggatgaccggacacttcaaagctgacatcgaaatagcctttttccgctttccagtgatccatgtcgtcgttttgtgggtttacgagcacatccgcccccatctctttgcccaggctaagggaacggggactcacatcagcacagacaatttccgcggcccccagtgttttcactgcactgacaatcaggcagccaatgggtccaacaccggaaataaatactcgcttgccctgtaactcgccggcctgatgtgcggcatgaatcgcgacggctaaaggttcggcaaaagccataaccttttcgtcagctttggccggataagggacacattggctcgtttcgaccattttataacgggtaaaaccaccatcaacatgagggaaatacatggcactgccaaaaaaacgcatatctgtacactgattctcgttatgttcaatgcagtatttgcagtgaccgcacggtttagacggattaatggctaccgtttgcccttcatgtaattcactactgtcgctatgaataactttaccgataacttcatgacctaacaccatcggtgcctttatcatgaaattacctacttttccttcctgataataatgtaaatcggaaccgcaaattccacctcgggttatttgtactaatgttccattattattccaatctatcgtctgctcggtaacggcaacagttttcttgcccgcaacaacgcaggactgtgttttcacttgcataaattcctcactggtcaggtagacacctcggaagcatttaagcggttttaactgtcattatttgtgatgaagatcacgtcagaaaattgttacattactatgttacgcataacgtgatgtgccttgtaattcttatcagtagaaataaaaaaacgtgaaattattatgccgccaggcgtagtatcgcagcaggtaagatgattcaggagattttaaatggcgggtgaaagctttattttgatgggcgttagtgggagtggtaaaacattaattggtagcaaggttgccgcgttattatctgctaaatttattgatggtgacgatcttcatccagccaaaaatatagataaaatgagccagggtattccattatctgatgaagatcgacttccctggctggaacgcttaaatgatgctagttacagtctttataaaaagaatgaaacaggatttattgtctgtagtagtttaaaaaaacagtatcgtgatattttacgcaagggtagcccccatgttcatttcctctggttagatggcgactatgaaactattctcgcgcgaatgcagcgtcgggctgggcattttatgccggtagcgttactaaaaagtcagtttgaggcactggagcgtccacaagcagatgaacaggatattgtgcgcattgatatcaaccatgatattgccaatgtcaccgaacaatgtcggcaggctgtgctggcgatacgacaaaacagaatatgtgcgaaagagggcagcgccagtgatcagcgctgcgaatgattttcaaaaatcggctttcaacaccacgcggtaacgcgccttaccgtcgcgcacatgctggatggcgtcgttaattttgctcatcgggaacagttcggtggtcggcgcaaccttgctgcgggcggcaaaacgcatcagcttacgcagctcataaggcgtgccggtagcagaaccagagacgctgcgatcgcccgcaattaacgtaaaggccggaacagacagcggcgtgagaaccgcaccgaccgtatggaaattaccgccataggtcagcgcctcaaaatagggctgccagtcgaggctgacgttgacggtgttgataatgagatcaaactgccccgccagtgctttcagtgcctgcggatcgcggctattcaccactttatcggcacccatcgccagcacttcctgctctttcgccggattagaactaaaggctgtcacctcgcatcccattgcgtgcagaagttttatagcgatatgccccagcccgccaataccaattaccccaacgcggctggtagcagtgatatggtgcatcaacagtggtttaaagaccgtgataccgccgcacaacagcggcccggcggactcgatatcaatattttctggcagtggaatcacccattgccagtccgcacgcaacttctcggcaaagccaccgcgattcataatcgtcggcaccgcaccttgctcgcagttgatctgattaccgctaatacaggcgtcgcagtgaccacagctacgcgccgtccagccaatcccgacacgctgaccgacctgcaaacctttatcctgcgcggcgctcccgagtgccaccacgcgcccaatcacctcatgcccggcaaccagcggatattgactaaatccccattcgttatcgatcatgctcagatcggaatggcagatcccgcagtaatccacctgcacttcaacatcttgtggcctcagctcaccgggatcgtactcataaacttccagttcgccgcccgcttcttttgcggcatagctttttatcatgctcattttttggtccttctctggtgttgtttgggaagtgtagagcatggcagggcggggtgcctggagtgtgacaaaggttacacatcgctgtatgcaatgctgaaaatttcagcacttagcgaggtgcgagcaagctggcgcttgcatggtggcgtgcgacaggtataatccacaacgttttccgcatacctcttcagtgccgaagtggcgaaatcggtagacgcagttgattcaaaatcaaccgtagaaatacgtgccggttcgagtccggccttcggcaccaaaagtatgtaaatagacctcaactgaggtctttttttatgcctgaaatccagtgtttatctatctttcccgctatattaactctctcaaggtcaaccgatatcaacgtacatctaccaacatatgttggtacagatgatggtatttccggttcgataatgcttgtaccaacagggagggaatacgagaaatcacaggacattgctaatgctggtacgcaatattacctgaagctaaaaacctgcacgttagccctttgtaggccagataagacgcgtcagcgtcgcatctggcataaacaaagcgcactttgctggtctgttcccctcaccctaaccctctccccggaggggcgaggggactgtccgggcacatttttagactttgtcatcagtctgagcctgccattggcaggctctggtgtccttttacgctaccatgctaataatcagcacaataatcagcccaaccacggagttgaccagctccagcagaccccaggttttcaacgtgtcttttacactcaggtcaaagtaacctttgaacaaccagaaagatgcatcgttaatgtgggtgagggtgttggaacccgcagccgtcgccagtaccagcagcgccggattcacgccaaccagctgaccagttgctggatctaggattgcagcactgataatcccggcggcggtcatcgcgctaacgacaccctgacccgtcgccagacgaattagcacagtgatcagccatgccatgatgtaggggctgatattgccgtgggacatcaacatgccgatggtgtcgccaatgccggtgtcgatgatggtctgcttcagcacgccacccgcaccgatgatcagaatcaccattgcaatactcttcaccgcgctttcaaaagcgttcatcacccactgcatgtcatgaccacgtgcggtgccaaagagtacgaatgcaaccaccatcgcaataaacattgcaatcgggctggaaccgataaagttaaccacttcccaggcaggggtatcttttaccagccagatattggcgatggtggtagagatcataatgatcgccgggatcagcggcaccagaatgctaacgccgaaagagggcagattattcatatctaccggttgatctgctttcaggaaacttggcgttgggcgctcaagattgccgaggaacttcggcaggatcagacctgcgcagattacacttgggatcgtcaccagtacgccatagatataaaccatccccatatccgcgccataagcattcaccagcgccaccggacccggctgcggtgggaacagactatgtgcggtagtggcagctgctactgccgggatcgccagtttcaggaacggaattttagcttcggcggcaataacaataaccagcggcgctaacatgataaaggccacttcatagaacatcgccagaccaaaaatcaggccgatgataatcacgctcagctgtacatagcgcagaccgagacgcgccagcagcgtatgcgctatctggtgagccgcgccggagtcgaccatcaatttaccgatgaccgcaccgaacaccacgatgatagccagttcccccagcgtgttgccgaagcccgctttcatagtgtgcagcaggctcatcaaatccatgcccgccagcatcccgacggacagcgccgccaccaacaaagccaccatactattgattttgaacttcaaattcagtaccagcatcagaccaatgccgaataccacccagagaatgttaagcacatgcataacgttttaccttacctggttgaaccgttgttattttgggcgatatgttatgtaaattggtcaaccattgttgcgatgaatgtcacatcctctgatcaataaccatcgattaccctttgctgcaatttgcagcaacaaccatgagagtgaaattcttgtgatgtggttaaccaatttcagaattcgggttgacatgtcttaccaaaaggtagaacttatacgccatctcatccgatgcaacgccacggctgcggtctggttgttcatccggatacctaaacaactccagggttccgcgtctctttgctgtggaacccactatgtgaaagaggaaaaatcatggaacagacctggcgctggtacggcccaaacgatccggtttctttagctgatgtccgtcaggcgggcgcaactggcgtggttaccgcgctgcaccatatcccgaacggcgaagtatggtccgttgaagagatcctcaaacgcaaggcgatcattgaagacgcaggcctggtgtggtctgtcgtagaaagcgtgccaattcacgaagatatcaaaacccacactggcaactatgagcagtggatcgctaactatcagcagactctgcgcaacctggcgcagtgtggcattcgcaccgtgtgctacaacttcatgccggtgctcgactggacccgtactgacctcgaatacgtgctgccagacggctccaaagctctgcgcttcgaccagatcgaattcgctgcattcgaaatgcatatcctgaaacgcccaggcgcggaagcggattacaccgaagaagaaattgctcaggcagctgaacgcttcgccactatgagcgatgaagacaaagcgcgtctgacccgtaacatcattgctggtcttccgggcgcggaagaaggctacaccctcgaccagttccgtaaacacctggagctgtacaaagatatcgacaaagcgaagctgcgcgaaaactttgccgtcttcctgaaagcgattattccagttgctgaagaagtcggcgtgcgtatggctgttcacccggacgatccgccgcgcccgatcctcggcctgccgcgcattgtttccaccattgaagatatgcagtggatggttgataccgtaaacagcatggcaaacggttttaccatgtgcaccggttcctacggcgtgcgtgctgacaacgatctggttgatatgatcaagcagttcggtccgcgtatttacttcacccatctgcgctccaccatgcgtgaagataacccgaaaaccttccacgaagcggcgcacctgaacggtgacgttgatatgtacgaagtggtgaaagcgattgttgaagaagaacaccgtcgtaaagcggaaggcaaagaagacctgatcccgatgcgtccggaccacggtcatcagatgctggacgacctgaagaagaaaaccaacccaggttactccgcaattggtcgtctgaaaggcctggccgaagttcgcggtgtcgaactggcgatccagcgcgctttctttagccgttaatatccaccggcatggctgcgcgccgtgccggttccttcttccttgccgtcactctttgaagacggattctggagtttacgatgactactattgttgacagcaatctgccggttgcccgcccgagttgggatcattctcgtctggaaagtcgcattgtgcatctcggttgcggggcgtttcaccgcgcgcaccaggcgctgtatacccatcatctgctggaaagcaccgacagcgactggggcatctgcgaagttaacctgatgccaggcaacgaccgcgtgctgatcgaaaacctgaaaaaacagcaactgctgtacaccgtagcggaaaaaggcgcagagagcaccgagctgaaaattatcggtagcatgaaagaagcgctgcatccggaaatcgatggctgcgaaggtattctcaacgcgatggcgcgtccgcaaacggcgattgtctctctaacggtcacggaaaaaggctactgcgctgatgcggcaagcggtcaactggatctcaataacccgctgatcaagcacgatctggaaaacccgactgcgccgaagtccgcgattggttacatcgtcgaagcgttgcgtctgcgtcgtgaaaaagggttgaaagcgtttacggtgatgtcctgcgataacgtgcgtgaaaacggtcatgtggcgaaggtcgcggtactggggctggctcaggcgcgtgacccgcagctggcggcatggattgaagaaaatgtcaccttcccgtgcaccatggttgaccgcatcgttccggcggcgacgccagaaaccttacaggaaattgctgaccagctgggtgtttacgacccgtgcgccattgcctgcgaaccgttccgtcagtgggtgattgaagataacttcgttaatggtcgcccggattgggataaagtgggcgcacagttcgttgcagacgttgtgccgttcgaaatgatgaagctgcgtatgctgaacggcagccactcttttctggcgtacctcggttacctcggcggctatgaaaccattgccgacaccgtgactaacccggcttatcgcaaagcggcctttgccctgatgatgcaggaacaagcgccaacgctgagcatgccggaaggtacagacctgaacgcctatgcgacgctgctgatcgagcgtttcagcaacccgtctctgcgtcaccgtacctggcagattgcgatggacggcagccagaagttaccgcagcgtctgctggacccggtgcgtctgcacctgcaaaacggcggcagctggcgtcacctggcgctgggcgtggctggctggatgcgttacacccagggcgtggatgagcagggtaatgccattgacgtggtcgacccgatgctggcggagttccagaagatcaacgcgcagtatcagggcgcagaccgcgtgaaagcgctgctgggcctgagcggtatttttgccgatgatctgccgcagaatgccgactttgttggcgcagtgacggcggcatatcagcagctgtgcgaacgcggtgcgcgcgagtgtgtggctgcgctgtaactaactgattaccctacagacttactggtcaatcaaactgatatttggttgaccagttttcgtttttttgcccacctgtacgtgccaacttccagtgctaatggtatagtttgagattaacgggggccgtaaaattgcccgttgtaggccggataaggcgttcacgccgcatccggcaaaaatttgattaaccgcacctaacggacacaacaccatgaaatctgccacctctgcgcaaagaccttaccaggaagtcggggcgatgatccgcgatctgatcataaagacgccgtacaatcctggcgaacggctgccgccggagcgtgaaattgcagaaatgcttgatgtcacgcggacggtggtacgtgaagcgctgatcatgctggagatcaaagggctggtggaagtacgccggggtgccggtatctatgttcttgataacagtggcagccagaacacagacagtccggatgccaacgtctgcaacgatgccggtccttttgagctgttacaggcgcggcagttattggagagcaacatcgccgagtttgccgctttgcaggctacccgcgaagatatcgtcaaaatgcgtcaggcattgcaactggaagagcgtgaactggcttccagtgcgccgggcagcagcgaaagcggtgacatgcagttccatctcgctattgccgaagcaacgcataacagcatgctggtggagctgttccgtcagtcctggcagtggcgggaaaacaatccaatgtggatccagttgcacagccatctggatgacagcctgtatcgcaaagagtggttgggcgatcacaaacagatcctcgccgcgttaatcaaaaaagatgcccgagcggcgaagctggcaatgtggcagcatctggaaaacgttaagcaacgtctgctggaattcagcaacgttgacgatatttattttgatggctatctgtttgatagttggccgctggataaagtcgacgcctgacttattataataagcgcaagggtaaacgttccttgcgctttcttaaattaagaagtcgcaatgagtattactttgtaaattgcagggtattgtttagctatctgtataacctgaatgttagtactcattcttcctggtagtaaggcgagattattaaagttgccatgcagcgtccggggaagtgttgggcgctgttttttttgtttcttaataatgtgttgtaagccgtagaaggcgtgtaggtcgcaccctatgcgacctacacatcagtcaggaattacccttcacgttctaccactttaatttccaccatgccgatcccgagcttacgcgggctgtgtccgaggatattcccttcgttggtactgacaggttccggcggcacaattaccagtgtgtcggcatcggttgggttatcgaaatgcagtgtggtggtggtcacttcattgcccagcacaagagtttgttcttcattgcctacgcgtaccggaataggacggctggcgttattgccgtatgctttggcggtaatcaccaggtcaaatttcttcggcagcggatgcttgtactcgatttttacttcatcgcccagctgcgcgttggaccagcggccccagctctccggacgggaaatcccgctaaactgtttcacctcttctggcgcaccggcgacgttaaagatgaaactgtcggctttgtagcgaatatcgttatcaacaatcttcagcgtatcgacattgcctttgtaacgcgccatgtcgatgaccgtatctttaaatgccgttttgccctgccatgttgttttgtcaacatgctgaacaatttgctgaccgccaagctgcccttggctgacacaccagtcggtggaaagtgccagttccggagcccagagttgtgccatcttgtagcaacggtcaacccagacgaaattgtcgcgtggagcgaaatcggccagctggaaacgcagcggtgcactgtattcgctttccggcagcggttccacgcgtttgtcactaacccgcaacagcagcggcaaacggaaatggctaccgctgaaggcaatcatgtttttctgctggtcgatggtgaactctttcatctctttagggaatttccacaggcggatgatatctggcttccacgccaatgttttctctttgatattgaggaagatttcgctcatgctctgcccggataaactgctacgaccaagtccgagatagttatcgccaccgagaatgtccagcaccgtcgcgccgttatccatcgtgttacgcttcactgccagcgtctcttgctgcggcttgtcgccacgaatgacaaaaaacaggttattgcgatcctgcttattgaggtatttccacgccgtgttgttcatcgctaaatggtcagaagagacgacgatgacggtatctttaaaccacggactcgctttgattttgttgataaacgtcgcgatgttctcctggctgcaacttaccgcgctgaaactctgattcggtttaccgtcaaaatcatattttttgcggttacaggtacgagagataaaaccatccgggtgatgggtatcgactgtcagggtaaacagactgaatcgctgaccactgcgggaaagctcttcaaactttttccacgcttcatcgagaacggtatcgtcgtagaatccccagtcgttgcgatagtgcgggtcggctaccacgcttttcagctcttcactgccgtataagtggtcgaagccatggctcttcaggaacacatctttaccggcaaaacgcagattcgcgccctgcacgaaatagttctgataaccgctgtttttcaggatatctcccagacagatgttctgcgggaagaagctggagacagaggcggaggcgttgccttcaaagggggcaaacagcggtatgccgcactgagaagccaccatgcccgcaatcgtgtaatctgttcccggcagctgctgcgtgtggctgaaatccaggccttcatttttcaacgcgcccagttcaggcgtgagatccgggaaagcctcgttatcaaaataggtccgctcgagactttcgccgtagatataaaccaggttgagtttcgggtcagggatagttttgctcggctctttataataagccgcaaagtccgggtcgccgtcgcgactctgggatttcaccagttccgttatctgacgaaatgccgggctggcgtccacgctacccagcgccagtaagagcgccagcaggctgtaaccaaaatggtgcggatgatggcgacgacggcgcaggatccagcccagcgcaccgaacaccgctgtcagccccagcacaatgccgatacccggcaaaatgtatttgctgacgccagcaccggtcaggctgttggttaaggtatagagaaccgcgtcgttaataccatcgccagtaaaatagtcgctggcaaacagggtgatatttaaaacgacaaatagccccagcaccgttaacgtggctgcaaaccaccaggtgttacgtcccgctttccatgcgtaaatcagcacagaggcgagaaaaagggcgaaagagagtagttcactcaacgggcgatcctcactaaaccgggccgtttagccaacgtttaagctttttgagaagcacaatgtaatggcgtcgccatattgctgcaattctagtgtcaaaaaaatgcgatgttgttaggaattagtttataaacagacttttttgattacggtcacttcccgtgtaacaggggtaaaaccgtccaggagcagggaaaagggcaggagagagccgcgtcagccgggtaacagctaaaacgcggcgtttcgcggttcaggaaatgaagttcagcccctgttttaacaccagatcgcaggctttggttttcaccttttctgccagcggagttgttccgatgttatccagattgagttgctgaccatctttggttttcagcaaaccctgaatgccgtccagatagttggtgtcttctttttgctcttcactgttcaggcccagcttttccagcacctggttcttgatgttttcggcatcggttacgctcgccagcttttgcttcgcgcagtattgcagaatgcctgcggcattgttcatgttatctgcgcttaaggcctggtttccgctgctaagcaagttagttaaactcgcgaggctccaaccgccttcctgtgtcgtgctgttttggttgccaagttcgctggcggcgctggagagcgcatctttccaggacgcagcatgcaccccggtggaaattaatgcgctggcggcaatggcacagcacagaagatgtttaacagttttcatcatcattactcaaggtggaattgtgtcgcagtataccgccagaaacggggattaatactctttacctgttacccggctacggtagctatcccagttgaagatcacccacaaactgttacccaggcgcatacggtccatcacgcgttcgcccagcaacttggtcatctcttccatattactgttggtcagcatcccggttgggcgtttggaagaagagcggcgatcgacgatctggttgatgatcactttttcgtatttgctttcggtctgcacgccgatctcatcgatcaccagcagatcaacgttgctcagatcgttaagcagttgttcttcgctggtaccgctattcctgaaggtatctttcatcgcgctcataatatcggccacggtgatgatcaatacggatttaccgcgtagcagcagctcgttgcagattgccgccgccagatggtttttgccggttcctggcttaccagaaaagatgaagctggcgatgttgccgtcaaactcttcgacatactggcgcgctttgcttaacgcattcatctgcccttcacactcaacgcgatagttctcaaaggaacagttctgatgcagtggacgaataccggagcggttaaaggtgcgctgcattttcatcgcccgattttcacgttcgagagcggcggagcggatcgctccttgttctttttgccaggccagtagttcttcacccgttttgaatgcgggtttgatatgggcaggcatcattttttgcaggcgttgcatcaggtcgccaacgtttttcatcgttaccctctgaatcctggtggaatttggctgtcaggttcgctgaccgtattcacatctcgtttcggcagtccgccgttgctggcacgaccgatttgcaggctgcgcgccagtttttgttgccactgcacatggtgaaagactttaccttccgcctgccagtaggcaatgaaactggccagttcttcggtggtcaccggctctcttagcgccacgccccatagcgccgccaggcggataaaatcggcatcgggttgccagtccggatacatggcgaatttccccatgggtacagcaacgggagcggcttgcggttcctgatagagttgatcgtccagagcgacatcgcttcccggacgcgccagcttttcttccagcgccagcagttcagccaggcgtgcaggcgtgacggcataaaacgccggggcattgttagcaaatacggcaaccacaccgccttcagcttttgccagaacggtttggtgatcgtgtaccagggcgtcaataccaacgacgtccggggtcaaaactctggaagacatactgtttctcaaatatggaacgatgaacgagaagggagataacttttatagtaacacacggaggagaggaggctgtctctcatccgtgtgcttaagcgaggcaattttatacgcgagggcgcttgcggtacaaccataatccaggaatggaaagaccgatggataacgcaccaacaatgctactagctgtaagaaagttggttaacagggtaatcatcaacggttcgctgtaacctaactggctgatttttaccgcgctaatcattgcggtataagcgcttatgcccgggaacatagggataacggccgccacggtaaacactttcggatgcgccagataccagcggctccattgaataccaatggtaccgaccagcatagaagccataaaggtactccactcaatattcaacccgctggtcatcaagatcattcgggaaccatgacctatcgagccaagcagcgcacaccagcgtaacgcccgcacgggaacgttgaacaccatcgcaaagccgaccgcaggaatggcggcgaggatcatatcctgcgccaacgctaacagaaattcgatcacacccatccgcgtagcccccaaatcgtcagtgccatcactacgccgacgcaggtagccagtgtcagcagactggcgatcgcccagcgtgccagtccggtattgatgtggcctttaaacatatcggcgacggcattaatcaacggaaagcccggcactagcagcagaacgctggcggccatcgcaatggtgggggtattgctgaaagtggggagttgcaaaagcaatccggaaatggtggtggcggcgaaagcggtaaggcaaaagttgatctgtggatgaagatgacgttgtgccagcagctggcggatatacatcgcggtcgtactggcaaagaaggtgatgacggcaccatcccagccaccgttattgagtttacagaaacaggcgcaagaaaggccaaccattaaggctaccagccatcttgggtaacgtaatggctgaatttggctaaatcgtttctctacgcctttgtaatccagcagatgatgctccgcaagaatcacaatgtgctggacttcagtcaccacatgcatattaatgccgcgatcgtgatttttacgtgtgcttgtcaggcattgcccatctttaatagttgtcagcactatggcgttgctagagatagaactttcgacgctgtccattcccagtgcccgacccagtcgactggaaagctcatcaaccaacgcgctttccgcaccatgttgcaaaagaaataatccacactggatacaaagccgtgttacggctcgctgttgctcagtttgcataactcgccctttgtcatagacgtgctgcgtattgttcagataatgagaatccatttgtatcatgaagcacggttgttttgcggtaggttaagatcaaaattgcgctgattaatcctggttatcgggagaagctcggtgataaaaagcgaattatctctcgccgcaaacaaactatcacatgaatattatcatcataatgaatttattgtttggcctttacgaatcaggataatagataaccgggcacgttttttaatgttaacaagctaaaaccatcagatttcattgaataaatattggttgtgtgattttgcattctgcgggaagggatatcatttaattataaattaaatgaatgtgatttctgtttttcattaagtattcctaacaacttaatgtagatattttaaatgtctccaggctatttcaccaggttatcatttgatgctaaccttctgacacatgcagtggagttgttgtgcagcaggagtatgctgatatgaaagtgaatgctaaggataatttattcgcttaatctattaatttgctggaaacatttaaggaatgaatatcctgaataaaccatcataatttttagacagtggatgtggaggaaatatgttgccaggatgctgcaaaaatggaattgttatcagtaaaatacctgttatgcaagcagggttaaaagaggtcatgaggactcacttccctgaatatgaaataatatccagcgcctctgcggaggaccttaccttattacaattacgtcgttccggattagtcattgctgatttagccggtgaaagtgaagatccacgttctgtttgtgaacattattattctttaatcagtcaatatcgggaaattcactgggttttcatggtgagtcgctcctggtattcccaggcagtagaactgctcatgtgccctacggcgacgttattgtctgatgttgaacccattgagaatctggtcaagaccgtacgttccggcaatacgcacgcagagcgtatcagcgccatgctgacctccccggcaatgactgaaactcatgattttagctatcgctccgtcattctcactcttagtgagcgcaaggtactgcggctattaggtaaaggatggggcatcaaccagatagctagtttgcttaagaaaagtaataaaactatcagcgcccaaaaaaacagtgcgatgcgtcgactggcaattcacagcaacgctgaaatgtatgcatggataaatagcgcgcagggtgcaagagaacttaacttgccttctgtttatggagatgccgcagaatggaacacagccgaattaagaagagaaatgagccacagttaaaaaaatgcgtcatgagtagtatcggtattgagagtttattcagaaagtttgcgggtaacccttataagctccatacctataccagtcaggagagttttcaggatgccatgagccggatcagctttgcggcggtcattttttctttttctgccatgagaagtgagcgcagagagggattatcttgcctgactgaactggcgattaagtttccgcgtacccggcgtttagttattgcggatgatgatattgaagctcggctgattggtagtttgagcccaagtccgctggacggtgtattaagtaaagcgagtacgctggagatttttcatcaggaactctttttgagtttaaatggtgtacgtcaggcgaccgaccgactgaacaatcagtggtacattaaccaaagccggacgttaagcccgacggagagagaaatattgcgctttatgagccgtggctacagtatgacacaaattgccgagcagcttaaacgcaatatcaaaacgatccgtgcacataaatttaatgtgatgagcaaactgggcgtcagttctgacgcagggttgttggaggccgcagatattctgttatgtatgcggcattgcgaaacaagtaatgtgttgcatccctattaatccgcatgatgccgggtttacttccccggcagtgctttcatttcagcgtacaatcgccacattgctgcacatccggtaagcgataacgctggcagcaagtgcggcgcaccagcaggccgtcgcgcagtaccacggtacgccagagtggattatcttcaccgttcgtgagcgttttctcaaaaaagagggcatggcgcaggctttcaacagtagcctcgccgagcagttgcttcatctcagtgagataccagttgatcaaataaccggtattactccagataagtttgccgttgatctctccggtcgcttctagtgcttgcacaaccggaaccagcgcctggctgattaacgtttccattcgatgctgcgggctatgtggtgttgcgtttttatcttcacacacatcgacccagaaacaggcgacgcgtccggtttcgtgaaactcagcatggaaatgttccgggctcacatctaatgccttttcctgcgtcagtagcgccagcattaatggtggcaccatcaggccgatataccattgtgcccatagactgatcagcggtttgttctcgcggatcatcatcggttggttgcgatagatatgatcggaatagaccgccagcagagaacttagcacattcggactactccattgcgccagcgtcatggcgttaagtggggcaggttcatccaggcggataaactccagcaaatgttcacgatgttttgcgatcgtcgcccgcacggcttgcgcaagcgtgggatcctgcggctggagatgcgttcgccagatgacatcttcatagagcggtgcggaacgataggccataatcgggatagtaatctaaatgataatgattgctaatcatagcgataggtttacccgatagcaagggatttatctggcttgcaaatgataaaaattatcatatgatattggttatcattatcaatgaaagagatgaaatcatgttgcaacgtacgctgggcagtggctggggagtgttgctgccgggattgctgattgcggggctgatgtatgcggatttaagcagtgatcagtggcggattgtcattctgatgggattagtattgacgccgatgatgctgtatcacaaacagttgcggcattacattttgctaccaagctgcctggcacttattgctggcatcatgctgatgataatgaatttgaatcagggatgaaaaatcaaggaagaaacaagaaaggaagtaaagataattggtgcgaggggggggacttgaacccccacgtccgtaaggacactaacacctgaagctagcgcgtctaccaattccgccaccttcgcacagtcatcttactttttttgatatcgcctcgtttggtgcgaggggggggacttgaacccccacgtccgtaagaacactaacacctgaagctagcgcgtctaccaattccgccaccttcgcccagtgcgagcaatatcaacgtggtttttggtgcgaggggggggacttgaacccccacgtccgtaaggacactaacacctgaagctagcgcgtctaccaattccgccaccttcgcataccatcaattcttaaaaagaattgctaccacggaggcgcattctagtggttttcagcttttcgtcaatagttaattatcgacagaggtgtaattgctggaaaaatgtccatcaggaaactagcgtgcaggtttggtatgcatgcgggggcagatgccagatgcgacgctggcgcgtcttatctggcctacgaagggctaacgtgcaggttttgtaggtcggataaggcgttcacgccgcatccgacacggtattcggcgagataattaacctttcttcgcctggcgggtcataatggcgcgatacaccttgaagcgccctgtttgcgcgatcacttcgtggaagccaaatgtctcatccagcacgtccggataaggcaggaaggcgttcgctacaattcgcagctcgccgccgctattaagatgacgcaccgcaccgcgaatcagcgtttgcgccgcatccaggctggtttgcatcccatcgtggaacggcgggttggagatgatcatatcaaaacgacctttcacctcggaaaagacgttgctggcaaagacttcaccttcaacaccgttggccgcaagtgttgcgcggctggcttctaccgccggggcagagacatcgcacaaggtgagacgaattttcgggctatggcgcgcaaaggcaacactaagcacgcccgcgccacagccgacatccagcactttacctttcgtgtgcggagttaacgtgctgagcagcaactggctaccgacatccagaccgtcgcggctaaacacgccaggcagcgttttgaccgtcaggccatcgacgctgtattcgccccagaatttctccgcatcaaataccggctgtttttccagacgaccaaaatagaggccacagcgacgagcgctgtcgactttattcaacggcgcataatctgccagcatctgctcggcgctgcgcacgccgctgcggttctcgccaacgacaaaaatatctgtccccactggcagcagagaaagtaaattcatcaactggaactgggcttccggtttgttcttcggccagtagtaaatcagcgtatcgcaatctgcgacgtcatccgccgtggcgaccagactgaaacgggcgttatcccccatctggcggcttaatacctgccagtggtggaattgctgggtatgagcacggctggccgcggtatctaaacgcgcgggcaggtcatcctgtaagtctccggcaaacagaatacggctttgttcgaaatcatcactgtgacgcagcaagacttcacttgccggggtaaatgcagacatggaatgctcctcaattgatactggcggcgattatagccatatgttggcgcggtatcgacgaatttgctatatttgcgcccctgacaacaggagcgattcgctatgacatcccgacgagactggcagttacagcaactgggcattacccagtggagcctgcgtcgccctggcgcgttgcagggggagattgccattgcgatcccggcacacgtccgtctggtgatggtggcaaacgatcttcccgccctgactgatcctttagtgagcgatgttctgcgcgcattaaccgtcagccccgaccaggtgctgcaactgacgccagaaaaaatcgcgatgctgccgcaaggcagtcactgcaacagttggcggttgggtactgacgaaccgctaagtctggaaggcgctcaggtggcaagtccggcgctcaccgatttacgggcaaacccaacggcacgcgccgcgttatggcaacaaatttgcacatatgaacacgatttcttccctcgaaacgactgatttaccggcggcttaccacattgaacaacgcgcccacgcctttccgtggagtgaaaaaacgtttgccagcaaccagggcgagcgttatctcaactttcagttaacgcaaaacggcaaaatggcggcgtttgcgattacgcaagtggtgctggatgaagctacattgttcaatattgcggtcgatcctgactatcagcgtcagggattgggaagggcgctgctggaacatctgatcgacgaactggaaaaacgcggcgtggcgacactatggctggaagtccgtgctagtaacgctgccgccattgccctgtacgaaagtttaggctttaacgaggcgacgattcgccgcaattactaccccaccacggacggtcgcgaagacgccatcatcatggcgttgccaatcagtatgtaatacaaggtggaataatgaagtgggactggattttctttgatgccgatgaaacgctgtttacctttgacagtttcaccggcctgcagcggatgtttcttgattacagcgtcacctttaccgctgaagattttcaggactatcaggccgttaacaagccactgtgggtggattatcaaaacggcgcgatcactagtttacagcttcagcacgggcggtttgagagctgggccgaacggctgaacgtcgagccaggtaaactcaacgaagcctttattaatgcgatggcggaaatctgcacgccgctgccgggcgcggtttctctgcttaacgccattcgtggcaacgccaaaatcggcatcatcaccaacggctttagtgccttgcaacaggtgcgtctggaacgcacgggcctgcgtgattacttcgatttgctggtgatttccgaagaagttggcgttgccaaaccgaataagaaaattttcgattatgcgctggaacaggcgggcaatcctgaccgtagtcgcgtgctgatggttggcgacactgccgagtccgatattctcggtggcatcaacgccgggcttgcgacctgctggctgaatgcacaccatcgcgagcaaccagaaggcatcgcgcccacctggaccgtttctagcttgcacgaactggagcagctcctgtgtaaacactgattgcctcccccccgttgatgggtaaaatagccgcaatttttcgttttcaacaagcgcggcgcgatgccgcttactcaagaagaaagaattatgacgttgtctccttatttgcaagaggtggcgaagcgccgcacttttgccattatttctcacccggacgccggtaagactaccatcaccgagaaggtgctgctgttcggacaggccattcagaccgccggtacagtaaaaggccgtggttccaaccagcacgctaagagcgactggatggagatggaaaagcagcgtgggatctccattactacgtctgtgatgcagtttccgtatcacgattgcctggttaacctgctcgacaccccggggcacgaagacttcagcgaagatacctatcgtaccctgacggcggtggactgctgcctgatggttatcgacgccgcaaaaggtgttgaagatcgtacccgtaagctgatggaagttacccgtctgcgcgacacgccgatcctcacctttatgaacaaacttgaccgtgatatccgcgacccgatggagctgctcgatgaagttgagaacgagctgaaaatcggctgtgcgccgatcacctggccgattggctgcggcaagctgtttaaaggcgtttaccacctttataaagacgaaacctatctctatcagagcggtaaaggccacaccattcaggaagtccgcattgttaaagggctgaataacccggatctcgatgctgcggttggtgaagatctggcacagcagctgcgtgacgaactggaactggtgaaaggcgcgtctaacgagttcgacaaagagctgttccttgcgggcgaaatcactccggtattcttcggtactgcgctgggtaacttcggcgtcgatcatatgttggatggcctggtggagtgggcacctgcgccgatgccgcgtcagactgatacccgtaccgtagaagcgagcgaagataaatttaccggcttcgtatttaaaattcaggccaacatggacccgaaacaccgcgaccgcgtggcgtttatgcgtgtggtgtccggtaaatatgaaaaaggcatgaaactgcgccaggtgcgcactgcgaaagatgtggtgatctccgacgcgctgacctttatggcgggtgaccgtagccacgttgaagaagcgtatccgggcgatatcctcggcctgcacaaccacggcaccattcagatcggcgacacctttacccagggtgagatgatgaagttcaccggtattccgaacttcgcaccagaactgttccgtcgtatccgcctgaaagatccgctgaagcaaaaacagctgctcaaagggctggtacagctttccgaagagggcgcggtgcaggtgttccgtccaatctccaacaacgatctgatcgttggtgcagttggtgtgctgcagtttgatgtggtggtagcgcgcctgaagagcgaatacaacgttgaagcagtgtatgagagtgtcaacgttgccactgcccgctgggtagaatgtgcagacgcgaagaaattcgaagagttcaagcgtaagaacgaaagccaactggcgcttgatggcggcgataacctcgcttacatcgctaccagcatggtcaacctgcgcctggcacaggaacgttatccggacgttcagttccaccagacccgcgagcattaattcttgcctccagggcgcggtagccgctgcgccctgtcaatttcccttccttattagccgcttacggaatgttcttaaaacattcacttttgcttatgttttcgctgatatcccgagcggtttcaaaattgtgatctatatttaacaaagtgatgacatttctgacggcgttaaataccgttcaatgcgtagatatcagtatctaaagccgtcgattgtcattctaccgatattaataactgattcagaggctgtaatggtcgttattcatcactcatcgcttttgtgatggcgaccattgacttctgtagagggtgaagtctctccctattcagcaatgcaacctcgtgttgccaggctcaaattacgagcaaacatacaggaataaatcgatgactatgacaagactgaagattagcaaaactctgctggctgtaatgttgacctctgccgtcgcgaccggctctgcctacgcggaaaacaacgcgcagactaccaatgaaagcgcagggcaaaaagtcgatagctctatgaataaagtcggtaatttcatggatgacagcgccatcaccgcgaaagtgaaggcggccctggtggatcatgacaacatcaagagcaccgatatctctgtaaaaaccgatcaaaaagtcgtgaccctgagcggtttcgttgaaagccaggcccaggccgaagaggcagtgaaagtggcgaaaggcgttgaaggggtgacctctgtcagcgacaaactgcacgttcgcgacgctaaagaaggcagcgtgaagggctacgcgggtgacaccgccaccaccagtgaaatcaaagccaaactgctggcggacgatatcgtcccttcccgtcatgtgaaagttgaaaccaccgacggcgtggttcagctctccggtaccgtcgattctcaggcacaaagtgaccgtgctgaaagtatcgccaaagcggtagatggtgtgaaaagcgttaaaaatgatctgaaaactaagtaattcgtcgtaattcgtcctcccgaactttgtcgggaggcgcgatgtgcaccacactaaaaatatcgcattgagtgattttcacgctcatatcaagcggtgacattaactatggtaaaggagacgcttatgtttcgttggggcatcatatttctggttatcgcgttaatcgccgccgcacttgggtttggtggtctggccggtaccgctgcaggcgcagctaaaattgtctttgtcgtcgggattattctgttcctggtgagtttgttcatgggccgaaaacgaccctaaatttcagaccattaagaaaattttatccaaagccagtccagcggactggcttttgcggttttagcgaataataaattgcgttactttgtcattctttcacaacaaaaacaggaaggcagaggtggggcagcgaatacctgtaacgcttggtaatattgcgccgttgagcctaaggccgttccagcctggacgaatagctctggtgtgcgaaggcggcggacagcgtggaattttcacggctggcgtgctggatgagtttatgcgcgcgcagtttaatcctttcgatctttatctcggcacatctgccggggcgcagaacctcagcgcgtttatctgcaatcagcccggttacgcgcgcaaagtcatcatgcgctataccacaaaacgcgaatttttcgatccattgcgctttgtccgtggaggaaatcttatcgatctcgactggctggtggaggccactgcaagccagatgccgttgcaaatggataccgccgcgcggttgtttgacagcggcaaaagcttttatatgtgcgcctgtcgtcaggatgactacgcgccgaattactttttaccaaccaaacaaaactggctggatgtgattcgcgcctccagtgcgatacctggcttttatcgtagcggagtgagcctggaaggcattaactacctggatggcgggatcagtgatgcgattccggttaaagaggcggcaaggcagggcgctaaaacgttggtcgtcattcgcactgtgccgagtcaaatgtactacacgccgcagtggttcaaacgcatggaacgctggctgggtgacagtagcctgcagccgctggtcaatctggtgcagcatcatgaaaccagctatcgtgacattcagcaatttattgagaaaccaccgggcaagctgcggatattcgaaatttatccgccgaagccattacatagtatcgcgcttggcagtcggattccggcgctgcgtgaagactataaacttgggcgtttatgcggtcgttatttcctcgccacggttggcaagctattaactgaaaaagcgccgcttacccgccatctggtgccagtggtgacgccggaaagcattgtcattccgcctgcgccagtcgccaacgatacgctggttgccgaagtgagcgacgctccgcaggcgaacgacccgacatttaacaatgaggatctggcttgatttgccgttttatcgacacccactgccattttgatttcccgccgtttagtggcgatgaagaggccagcctgcaacgcgcggcacaagcgggcgtaggcaagatcattgttccggcaacagaggcggaaaattttgcccgtgtgttggcattagcggaaaattatcaaccgctgtatgccgcattgggcttgcatcctggtatgttggaaaaacatagcgatgtgtctcttgagcagctacagcaggcgctggaaaggcgtccggcgaaggtggtggcggtgggggagatcggtctggatctctttggcgacgatccgcaatttgagaggcagcagtggttactcgacgaacaactgaaactggcgaaacgctacgatctgccggtgatcctgcatagtcggcgcacgcacgacaaactggcgatgcatcttaaacgccacgatttaccgcgcactggcgtggttcacggtttttccggcagcctgcaacaggccgaacggtttgtacagctgggctacaaaattggcgtaggcggtactatcacctatccacgcgccagtaaaacccgcgatgtcatcgcaaaattaccgctggcaagcttattgctggaaaccgacgcgccggatatgccgctcaacggttttcaggggcagcctaaccgcccggagcaggctgcccgtgtgttcgccgtgctttgcgagttgcgccgggaaccggcggatgagattgcgcaagcgttgcttaataacacgtatacgttgtttaacgtgccgtaagccggataaggcgttcacgccgcatccggcagttggcgcacaatgcctgatgcgacgcttaacgcgtcttatcatgcctacaggtttgtgccgaaccgtaggccggataaggcgttcacgccgcatccggcagttggcgcacaatgcctgatgcgacgcttgtcgcgtcttatcatgcctacaagtctgtgccgaaccgtaggccggataaggcgttcacgccgcatccggcagtcggcgcataatgcctgatgcgacgcttgtcgcgtcttatcatgcctacaggtttgtgccgaaccgtaggccggataaggcgttcgcgccgcatccggcagttggcgcacaatgcctgatgcgacgcttgacgcgtcttatcaggcctacaagtctgtgccgaaccgtaggccgtatccggcatgtcacaaatagagcgccggaaatatcaaccggctcaccccgcgcacctttaacgcatcagccaacggctcaacgtcttccggcgtggcgctcgcccagctttgcgcctcgccatacacgccgtgggcatgaaacgcgttcaggcgtaccggaacatcgccgagtcccttgataaacgccgccagttcttcgatgtgttgcaaataatccacctggccagggatcaccagcaaacgcagttccgccagcttgccgcgctctgccagcaaatagatgctgcgcttaatctgctgattatcgcgtccggtgagttgttgatgacattcgctcccccacgctttgagatcgagcattgcgccgtcgcacaccgggagcaatttttcccagccggtttcgctcaacatgccgttactgtccaccagacaggtgagatggcgcagttgcggatcgtttttgatagcagtaaacagcgccaccacaaacggcagctgggtcgtggcttcaccgccactcaccgttatcccttcgataaacagcactgctttgcggacatggctaagcacttcgtccacgctcatggattgcgccatgggcgtggcatgttgcggacacctcttcaggcaggtatcacactgctcgcaaaccacagcgttccacaccactttgccgtcaacaatctgcaacgcctgatgcggacactgtggcacgcactccccacagtcattgcaacgtcccatcgtccacggattgtgacagtttttgcagcgcagattgcagccctgcaaaaacagagccagacgactgcctggcccgtcaacgcaggagaaggggataatcttactgactaaagcgcatctgctgttcatggcttatcacgcgcggctggcgttccagaatacgagtgttgcgtgcggcttcttcgcccagccaggtggtgttggtgcgactaccttcggcgcgatatttttctaaatcgctcaaacgcaccatataaccggtaacgcgaaccagatcgttaccgctgacattggcggtaaattcacgcattccggctttaaaggcaccgaggcaaagctgtaccagtgcctgcgggttacgtttgatggtttcgtcgagcgtcagaatgtcgctgatgccggaataataataagcatgatgcggggcgacagtttgcagatgggtgatcggatctggctcatcgccatacggcaaacgcgcgcccggcgtggtgccgatatcggaactgatcccgctctgtgcgtgtaacatggcgcgtttttgccagccatatttcacgggggtattggcgacaaactccgccagttgcgcgctgatgcgataacctacttcatttgcggcggcttctttaccgtagcgcgcggcaatcccttctttttcacacagcaagttaaccgcttccgccagcccatacatgccaaacattggcacaaaacgttcagggttaatcagcccttctttcaccaggaagctattctcaaagaagtgactttgttgatagaggaattcacaccgcgcatcgatgatggcgatctgctgctggcagtagtgcggtagagtgcgcgtaaagaagtcatccaggctttcgctgcgctcggcaatggctttcaggttaaggcgtaccagcgtgctgccaccacccgccagcggcagactgttgtaacagctcacaatcccgtagcccccttttgtgaaaattttatcatgcaccggaccgttggcgatgtgcggtttgctacattcacagatgttcttcgccacttccagcagcaggtcatcaggggtgatttcaggatcgtagataaaggtcaggttcggactaacctgcttcaactctgcatctgcacgtaagatcgcgcgggtaatggggctatcagacgggccgatattggcgtgcataaaggcgtctggcagggttctgtcgaggtaacgccagaaacgttttattcgaacatcgatctcgtcttgtgttagaattctaacatacggttgcaacaacgcatccagttgccccaggtagaccggcatgcttgtgacgctcggtacgtggtggtaaagaatggtcagcagagagagtgcgtcatcaagatctttcgcgccttccagctccagccattcggaaccgttcgccagaaaacgggcgtaatcgggtaagacatagcgcggtttgtacggcgcatgaccttcaaacatatcgcagattacaccttcatccagcgcgcggcgggcttcggcaggaagctgtgggtaaggcagattgttttctgcttccagtgccagaaaatggcgcttctgctccgggctaagcactgggctggtgacaatttgctggcaacgttgttgcagtgcattttcatgagaagtgggcatcttcttttccttttatgccgaaggtgatgcgccattgtaagaagtttcgtgatgttcactttgatcctgatgcgtttgccaccactgacgcattcatttgaaagtgaattatttgaaccagatcgcattacagtgatgcaaacttgtaagtagatttccttaattgtgatgtgtatcgaagtgtgttgcggagtagatgttagaatactaacaaactcgcaaggtgaattttattggcgacaagccaggagaatgaaatgactgatctgaaagcaagcagcctgcgtgcactgaaattgatggacctgaccaccctgaatgacgacgacaccgacgagaaagtgatcgccctgtgtcatcaggccaaaactccggtcggcaataccgccgctatctgtatctatcctcgctttatcccgattgctcgcaaaactctgaaagagcagggcaccccggaaatccgtatcgctacggtaaccaacttcccacacggtaacgacgacatcgacatcgcgctggcagaaacccgtgcggcaatcgcctacggtgctgatgaagttgacgttgtgttcccgtaccgcgcgctgatggcgggtaacgagcaggttggttttgacctggtgaaagcctgtaaagaggcttgcgcggcagcgaatgtactgctgaaagtgatcatcgaaaccggcgaactgaaagacgaagcgctgatccgtaaagcgtctgaaatctccatcaaagcgggtgcggacttcatcaaaacctctaccggtaaagtggctgtgaacgcgacgccggaaagcgcgcgcatcatgatggaagtgatccgtgatatgggcgtagaaaaaaccgttggtttcaaaccggcgggcggcgtgcgtactgcggaagatgcgcagaaatatctcgccattgcagatgaactgttcggtgctgactgggcagatgcgcgtcactaccgctttggcgcttccagcctgctggcaagcctgctgaaagcgctgggtcacggcgacggtaagagcgccagcagctactaagtaagatgctttacgcctgatgcgctgcgcttatcaggcctacgagacgtatctacccgtaggccggataaggcgtagacgcatccggcaaaagccgcctcatactcttttcctcgggaggttaccttgtttctcgcacaagaaattattcgtaaaaaacgtgatggtcatgcgctgagcgatgaagaaattcgtttctttatcaacggtattcgcgacaacactatctccgaagggcagattgccgccctcgcgatgaccattttcttccacgatatgacaatgcctgagcgtgtcagcctgaccatggcgatgcgagatagtggaaccgttctcgactggaaaagcctgcatctgaatggcccgattgttgataaacactccaccggtggcgtcggcgatgtgactagcctgatgttggggccgatggtcgcagcctgcggcggctatattccgatgatctctggtcgcggcctcggtcatactggcggtacgctcgacaaactggaatccatccctggcttcgacattttcccggatgacaaccgtttccgcgaaattattaaagacgtcggcgtggcgattatcggtcagaccagtagtctggctccggctgataaacgtttctacgcgacccgtgatattaccgcaaccgtggactccatcccgctgatcaccgcctctattctggcgaagaaacttgcggaaggtctggacgcgctggtgatggacgtgaaagtgggtagcggcgcgtttatgccgacctacgaactctctgaagcccttgccgaagcgattgttggcgtggctaacggcgctggcgtgcgcaccaccgcgctgctcaccgacatgaatcaggtactggcctccagtgcaggtaacgcggttgaagttcgtgaagcggtgcagttcctgacgggtgaatatcgtaacccgcgtctgtttgatgtcacgatggcgctgtgcgtggagatgctgatctccggcaaactggcgaaagatgacgccgaagcgcgcgcgaaattgcaggcggtgctggacaacggtaaagcggcagaagtctttggtcgtatggtagcggcacaaaaaggcccgaccgacttcgttgagaactacgcgaagtatctgccgacagcgatgctgacgaaagcagtctatgctgataccgaaggttttgtcagtgaaatggatacccgcgcgctggggatggcagtggttgcaatgggcggcggacgccgtcaggcatctgacaccatcgattacagcgtcggctttactgatatggcgcgtctgggcgaccaggtagacggtcagcgtccgctggcggttatccacgcgaaagacgaaaacaactggcaggaagcggcgaaagcggtgaaagcggcaattaaacttgccgataaagcaccggaaagcacaccaactgtctatcgccgtatcagcgaataacggtatactgatctgatcatttaaatttgaagcactgagtacggagaacatatgaaacgtgcatttattatggtgctggacagtttcggcatcggcgctacagaagatgcagaacgctttggtgacgtcggggctgacaccctgggtcatatcgcagaagcttgtgccaaaggcgaagctgataacggtcgtaaaggcccgctcaatctgccaaatctgacccgtctggggctggcgaaagcacacgaaggttctaccggtttcattccggcgggaatggacggcaacgctgaagttatcggcgcgtacgcatgggcgcacgaaatgagttccggtaaagataccccgtctggtcactgggaaattgccggtgtcccggttctgtttgagtggggatatttctccgatcacgaaaacagcttcccgcaagagctgctggataaactggtcgaacgcgctaatctgccgggttacctcggtaactgccactcttccggtacggtcattctggatcaactgggcgaagagcacatgaaaaccggcaagccgattttctatacctccgctgactccgtgttccagattgcctgccatgaagaaactttcggtctggataaactctacgaactgtgcgaaatcgcccgtgaagagctgaccaacggcggctacaatatcggtcgtgttatcgctcgtccgtttatcggcgacaaagccggtaacttccagcgtaccggtaaccgtcacgacctggctgttgagccgccagcaccgaccgtgctgcagaaactggttgatgaaaaacacggccaggtggtttctgtcggtaaaattgcggacatctacgccaactgcggtatcaccaaaaaagtgaaagcgactggcctggacgcgctgtttgacgccaccatcaaagagatgaaagaagcgggtgataacaccatcgtcttcaccaacttcgttgacttcgactcttcctggggccaccgtcgcgacgtcgccggttatgccgcgggtctggaactgttcgaccgccgtctgccggagctgatgtctctgctgcgcgatgacgacatcctgatcctcaccgctgaccacggttgcgatccgacctggaccggtactgaccacacgcgtgaacacattccggtactggtatatggcccgaaagtaaaaccgggcagtctgggtcatcgtgaaaccttcgcggatatcggccagactctggcaaaatattttggtacttctgatatggaatatggcaaagccatgttctgatggatttgggcggagcgttgactccgcctttgttatgtcacaaaaaggataaaacaatggctaccccacacattaatgcagaaatgggcgatttcgctgacgtagttttgatgccaggcgacccgctgcgtgcgaagtatattgctgaaactttccttgaagatgcccgtgaagtgaacaacgttcgcggtatgctgggcttcaccggtacttacaaaggccgcaaaatttccgtaatgggtcacggtatgggtatcccgtcctgctccatctacaccaaagaactgatcaccgatttcggcgtgaagaaaattatccgcgtgggttcctgtggcgcagttctgccgcacgtaaaactgcgcgacgtcgttatcggtatgggtgcctgcaccgattccaaagttaaccgcatccgttttaaagaccatgactttgccgctatcgctgacttcgacatggtgcgtaacgcagtagatgcagctaaagcactgggtattgatgctcgcgtgggtaacctgttctccgctgacctgttctactctccggacggcgaaatgttcgacgtgatggaaaaatacggcattctcggcgtggaaatggaagcggctggtatctacggcgtcgctgcagaatttggcgcgaaagccctgaccatctgcaccgtatctgaccacatccgcactcacgagcagaccactgccgctgagcgtcagactaccttcaacgacatgatcaaaatcgcactggaatccgttctgctgggcgataaagagtaattgtgtttcgctgcaaggcgattgccttgtgaagccggagcgggagactgctccggctttttagtatctattcatttttctctccagcttgaatattttcgctatacttttcagtgaaatgtgttaataaatctattcaagtatctattcacgaatctattcattaatgagcgagctgactgatcttttactgcaagggccgcgttctgccccggaattgcgccagcgtctggcaatcagtcaggcgacgttcagtcgccttgttgccagagaagatcgggtgattcgctttggtaaagcacgggcaacgcgatatgcactgctgcgtccttatcgcggaattgagcgtattcccgtctggcgggtggacgataccggaaaggcgcataaattcgccgacatccggttgtgctggccgcagggaagttgtctggtaacaggcgcagatggcgacgaacagtggtttgatggtttgccctggtatttgaccgatctccgaccgcagggctttttagggcgcgcgtggggcaggaagttagccgcgcaactgaatctgactgatgatatacgtctctggcaggaagaagatgtgctctacgccctgaccgtatttaacggtgaatatactggcggttggttggtcggggaggggaattatcagcgatggattactgcacaacaccctgcggaaattcctctggatcaaaaactcacccattacgaacagctggcaagtgatgcactggcaggagaaattgtgggttcttctgcgggcggcgagcagccaaaatttacctactatgcacaaacgccgagtggcaataaacatgtgttggtgaaattcaccgtaccacagcaaaccgcggtcagccaacgttggggtgacctgctaattgctgaatctattgccgcgcaaatcctgcgtgacggtgggatccacgccatcgagagtacggtgcttgtaacaagtaacaggcaggtattcctcgaagcggaacgctttgactgcaaaggtaacgatggtcgcttgcctattgtgagcctggaggcggtgcagagtgagtttatctcttctccgggaagctggccgcaggcaatgcgccgtttgtgtgagcaacaacttgtcactcaccagagcgtggcgcaaacagaagtgatctgggcatttgggcgacttatcgccaacagcgatatgcacgcaggtaatttaagcttttatttatctgaaccgccatttgcgctgacgcccgtctacgacatgctgccgatggtctatgcaccaaacagcgctggaatgctgcgtgatgctgccattgaggtgaagtttgatcttaacgtcagtaaaagcgcttggttaacggcgatcccgctggcgcagcagttctggcaaacggtcgccagagatccgcgtatcagcgaggcgtttcgccacattgcgcaagaaatgccggaaaaaatccggcaaatcgaagagaaagttgcccgcatgggcgggtaattaccttacagcccccgccatccatgcgcttaactcccgtagctctttttcctgttccgggaagtcaaccaacagcgcttcgcactcctgttgcagcatatctgcgcggtacaggcagccttgcagtcgtccggcgagggcttccagcggcgcggggttgaggctgtcggtaaacacctgggcgcgggtgatatggcctttttcaacgtcgaaatgcagttccacgccgccccaggtaaagcgttcatccagcagatggctgaatgccggagcctgaccgaagttccattcccagctactctggcgggcaaaggtttcggcgaagtttggcaagtctggcgttttgttcggggagatgatttccgcttccacgcgctcgccataatgggcgaaaaaggcctcggttatggcctcgcaaacctgctcatgggtgatccccggcaacagctcggtgaggttggtcacgcgggaacgtacgctcgtaatgcctttcgccgccagtttctttttatccggattgagatagtttgccaggcggctgaggtcggcattgagtagcaaggtgccgtggtggaagccgcgatctttggtttcgcgataggcgctgccactgactttgcggtcgccttcgacggttttcaccaccagatcgttacgtccggacgcttcggcgctgacgccgagcgcgttcagcgcattgagcacaatgctcgtggagatagttttatcgtactccggcttgccagccataaaggtaaagcaggtattgccgagatcgtggaacaccgcgccgccaccgctactgcgccgcgccaggcggacgttatcttcttccatccgccgggtattacactctttccacgggttctgcgcgcgaccaattactaccgtgtcggcattgcgccagagaaacagaacgcgctgcgtggcgggcatttggcgaaaaatacactcttccaccgccaggttaaaccacgggtcgtaagagtcagagatgagcaggcgtaatgtggacataacgatttcctttcttgtagtaatgggtcactcttttttctcgctttcttcctcttccggcaccggtttgctggcggctaacaggaaggggctttgctgccagcgggtgcgtttaccctgtagcagcgtgcgggtcagcactacaccgattgccagactgagcagcaacatcaggcgtaaaatgttagtggtgttatccacctgttgggcttcggtggcgagcgtatgggtgtcgagtgtcaggcgcagatagccgagcggtccgtttttacccgcaattggctcgacaatctgctggttaaaatagccgcctgcttttttaccgtcgagcgccagccggtcgcgcacttcgacgctttcgccagaacgtgcgataagatcgccttgttcgtcatacacacccgcgtcgaggatacggctttcatccgttaactgatcgaggatcgcctgaatgcgtttttcatccggactgtcggtacgcatcagcggtgcaacgttcagcgtcacctgacgcgccagggtgcgggccagttcttccagctgtggattacgctgtcgctggtggttttgactaaaccaactcgctccctgcatcagcgccactaacaaggcaagacagaacaggacaatcactgcccgatgcagccggaatttcagttttgtgcgagccatcttccaccctttgaaaatttgagacttaatgttgccagaagcaatggatacaaggtagcctcatgcgttattttccctgcttcgaacgattttacaggagccttaatgcctaacattacctggtgcgacctgcctgaagatgtctctttatggccgggtctgcctcttagtttaagtggtgatgaagtgatgccactggattaccacgcaggtcgtagcggctggctgctgtatggtcgtgggctggataaacaacgtctgacccaataccagagcaaactgggtgcggcgatggtgattgttgccgcctggtgcgtggaagattatcaggtgattcgtctggcaggtagtctcaccgcacgggctacacgcctggcccacgaagcgcagctggatgtcgccccgctggggaaaatcccgcacctgcgcacgccgggtttgctggtgatggatatggactccaccgccatccagattgaatgtattgatgaaattgccaaactggccggaacgggcgagatggtggcggaagtaaccgaacgggcgatgcgcggcgaactcgattttaccgccagcctgcgcagccgtgtggcgacgctgaaaggcgctgacgccaatattctgcaacaggtgcgtgaaaatctgccgctgatgccaggcttaacgcaactggtgctcaagctggaaacgctgggctggaaagtggcgattgcctccggcggctttactttctttgctgaatacctgcgcgacaagctgcgcctgaccgccgtggtagccaatgaactggagatcatggacggtaaatttaccggcaatgtgatcggcgacatcgtagacgcgcagtacaaagcgaaaactctgactcgcctcgcgcaggagtatgaaatcccgctggcgcagaccgtggcgattggcgatggagccaatgacctgccgatgatcaaagcggcagggctggggattgcctaccatgccaagccaaaagtgaatgaaaaggcggaagtcaccatccgtcacgctgacctgatgggggtattctgcatcctcagtggcagcctgaatcagaagtaattgctcgcccgccatcctgcgggcggcacagcattaacgaggtacaccgtggcaaaagctccaaaacgcgcctttgtttgtaatgaatgcggggccgattatccgcgctggcaggggcagtgcagtgcctgtcatgcctggaacaccatcaccgaggtgcgtcttgctgcgagcccaatggtggcgcgtaacgagcgtctcagcggctatgccggtagcgccggggtggcaaaagtccagaaactctccgatatcagccttgaagagctgccgcgtttttccaccggatttaaagagttcgaccgcgtactaggcggcggcgtggtgccaggaagtgccattctgattggcggtaaccctggtgcggggaaatccacgctgctactgcaaacgctgtgcaaactggcccagcagatgaaaacgctgtatgtcaccggcgaagagagcctgcaacaggtggcaatgcgcgctcatcgccttggcctgccgactgacaatctcaatatgttgagcgaaaccagcatcgaacagatctgcctgattgccgaagaagagcaaccgaagctgatggtaattgacagcatccaggtgatgcatatggcggatgtacagagtagccctggtagcgtggcgcaggtgcgtgaaacggcggcttatttgacacgcttcgccaaaacgcgcggtgtggcgattgtcatggtggggcacgtaaccaaagatggtagcctggctggcccgaaagtgctggaacactgtatcgactgtagcgtgcttttggatggcgatgccgactcccgttttcgcaccttgcgcagccataaaaaccgcttcggcgcggtgaatgagctgggcgtcttcgcgatgaccgaacaggggctgcgtgaagtcagcaaccctagcgcaattttcttaagtcgcggcgatgaagtgacctccggtagcagtgtgatggtggtatgggaaggaacgcgtccactgctggtggagattcaggcgctggtcgatcacagcatgatggcgaacccacgccgcgtggcagtggggctggaacaaaaccgtctggcaatcctgctggctgtgttgcaccgtcacggtggtctgcaaatggccgatcaggatgtgtttgtgaacgtggtcggcggcgtgaaggtaaccgaaaccagtgccgacttagcgttactgctggcgatggtttccagcctgcgcgacagaccgctgccgcaggatctggtggtgtttggtgaagtcgggctggcaggggagatccgcccggtgcccagcggtcaggaacgaatctctgaagcggcgaaacacggttttcgccgggcgattgttccggcggctaacgtgccgaaaaaagcgccggaagggatgcagatttttggcgttaaaaaactctccgacgcgcttagcgtgttcgacgacttataatgagatatacggagggagatatgagcagttttgattacctgaaaactgccatcaagcaacagggctgcacgctacagcaggtagctgatgccagcggtatgaccaaagggtatttaagccagttactgaatgccaaaatcaaaagccccagcgcgcaaaagctggaggcgttgcaccgttttttggggcttgagtttccccggcagaagaaaacgatcggtgtcgtattcggtaagttctacccactgcataccggacatatctaccttatccagcgcgcctgtagccaggttgacgagctgcatatcattatgggttttgacgatacccgtgaccgcgcgttgttcgaagacagtgccatgagccagcagccgaccgtgccggatcgtctgcgttggttattgcaaacttttaaatatcagaaaaatattcgcattcatgctttcaacgaagagggcatggagccgtatccgcacggctgggatgtgtggagcaacggcatcaaaaagtttatggctgaaaaagggatccagccggatctgatctacaccagcgaagaagccgatgcgccacagtatatggaacatctggggatcgagacggtgctggtcgatccgaaacgtacctttatgagtatcagcggtgcgcagatccgcgaaaacccgttccgctactgggaatatattcctaccgaagtgaagccgttttttgtgcgtaccgtggcgatccttggcggcgagagcagcggtaaatccaccctggtaaacaaacttgccaatatcttcaacaccaccagtgcgtgggaatatggccgcgattatgtctttagtcacctcggcggtgatgagatcgcattgcagtattctgactacgataaaatcgcgctgggccacgctcaatacattgattttgcggtgaaatatgccaataaagtggcatttatcgataccgattttgtcaccactcaggcgttctgcaaaaagtacgaagggcgggaacatccgttcgtgcaggcgctgattgatgaataccgtttcgatctggtgatcctgctggagaacaacacgccgtgggtggcggatggtttacgcagcctcggcagtagcgtggatcgcaaagagttccagaacttgctggtggagatgctcgaagagaacaatatcgaatttgtgcgggttgaagaggaagattacgacagtcgtttcctgcgctgcgtggaactggtgcgggagatgatgggggagcagagataaccgtgatgaaactgctcaaaggcgaggtataaaatgagtttttttgatgagttgaaaacctctctggaagaggctgtcgagattaaacaaggtttgaaaaaacctgcacgggtgacccgccacgaaattgaggatgctaaggctgttgtagaccggaaacggtgttcacgccgcatccggcattcggtgctcaatgcctgatgcgacgcttaccgcgtcttatcaggcctacagttttacaacgtattgaaattgctggttttgtaggccggataaggcgttcgcgccgcatccggcattttacgcattacttcgcaatacgcttgtacttgatacgcttcggctccagcgcgtctgcgcccagcgtgcgtttcttgtactcttcgtactcggtaaagttaccttcgaagaactcaactttaccttcatcctggtaatccagaatgtgcgtggcgatacggtcgaggaaccaacggtcgtggctgataaccatcgcacagcccgggaactccagcagggcgttttccagcgcgcgcagggtttcgatatccaggtcgttggttggttcgtcgagcagcagcatgttgccgccaacctgcagcagcttcgccagatgcagacgaccgcgctcaccaccggagagttcaccaacgcgtttaccctgatcaacccctttaaagttaaagcggccaacgtaggcgcggcttggcatctcggtgttgccgatcttcatgatatccagcccgccggaaacttcttcccaaacggttttgctgttatccatactgtcacggaactgatcaacgctcgccagtttcaccgtttcacccaaagtgatggtgccgctgtccggctgttcctgaccagagatcatacggaacagggtgcttttacccgcaccgttcggaccgatgatcccgacgatcgctcctttcgggatgctgaagctcaggtcatcaatcagcagacgatcgccataggatttacgcaggttgctgacttccagcactttatcgcccagacgcggtccaggtggaataaacagttcgttggtttcgttacgtttctgatattcggtgctgttcagttcttcaaagcgcgccagacgtgctttacctttgctctgacggcctttagtaccttgacgtacccattccagctctttctcaatgctcttacgacgcgccgcttcttgactagcttcctgcgccaggcgctgatctttctgctccagccaggaggagtagttaccttcccacggaataccttcaccgcggtcaagttcgaggatccagcctgcaacgttatcgaggaagtaacggtcgtgggtaatcgccacaacggtgccttcgaagtcgtgcaggaagcgttccagccaggccacggattcggcatccaggtggttggtcggttcgtcgagcagcagcatgtctggtttttccagcagcaggcggcacaacgctacgcgacgacgttcaccaccggagaggttagcgattttcgcgtcccagtccggcagacgtagcgcatccgccgcacgctccagctgtacgttcagattatgaccgtcgtgagcctgaatgatctcttccagacggccttgttcagcggccagcttgtcaaaatcggcatccggatcggcgtacagcgcatacacttcatccaggcgtttcagggcgttaaccacttcactaaccgcttcttcaatggactcacgcacggtgtgttccgggttcagctgcggttcctgcggcagataaccaatcttgatgtctggctgcggacgcgcttcaccttcgatgtctttatcaatgcccgccataatgcgcagcagggtggacttacccgcgccattcagacccaggacaccaatttttgccccagggaagaaactcagagagatgtttttcaaaatatgacgtttcggcggaacaactttgccgacacgatgcatggtataaacgaattgagccacgttggacttcgcctctatgtttatcgtgataatgagttttcaaaggcgaagtgtagcctttttccccgcctaatcccagccggtcgatcaccctcgcagtaaaagtaaaaaagtgtccgtaacgtggcgtaaacggcaatgactggttagcataaatctattacgcggcatgacgctgcattgatgtatttacacttagaggatgcgcttgtggaaaaagccaaacaagttacctggcggctgttggctgccggtgtctgtctgctgacggtcagcagcgtggcgcgagccgacagtctggatgagcagcgtagtcgttacgcgcaaatcaagcaggcctgggataatcgacaaatggatgtggtcgaacaaatgatgcctggactgaaggattatccgctttatccctacctggaataccgccagatcaccgatgatctgatgaatcaaccggcggtgacggtcactaactttgttcgcgctaaccccacgcttcctcccgctcgcacgctgcaatctcgtttcgtcaatgaactggcgcggcgtgaagactggcgtggcttgttagcctttagcccggaaaagcccggaactaccgaagcgcaatgtaattactactatgcgaaatggaacaccgggcagagtgaagaagcctggcaaggggcgaaagagctgtggctaaccggcaagagccagcctaacgcctgtgacaagttatttagcgtctggcgtgcgagtggtaaacaagatccgctggcgtatttagagcgtatccgtctggcgatgaaagcgggtaacacaggcctggtaacagtgctggcagggcagatgcctgccgattaccagactatcgccagcgcaatcattagtctggcgaacaaccctaatacggtactgaccttcgcgcgtacaactggcgcgaccgattttacccgtcaaatggcggcggtggcgtttgccagtgtggcgcggcaggatgctgagaatgcacggctgatgatcccaagccttgcccaggcgcagcagcttaatgaagatcagattcaggagctgcgcgatatcgtcgcctggcgtttgatgggcaacgatgtcaccgacgagcaggcgaaatggcgcgatgacgccattatgcgcagccaatctactagccttattgaacgccgtgtacgaatggcgcttggcaccggcgatcgtcgcggcctgaatacctggctggcgcgtctgcctatggaagcgaaagagaaagatgaatggcgttactggcaggcggatttattgctggaacgcggacgtgaagctgaagcaaaagagattttgcatcaactcatgcaacagcgtggtttctacccgatggttgcagcacaacgcatcggcgaagagtatgagctgaagattgataaagcgccgcagaatgttgacagcgccctgactcaggggccggagatggcgcgcgtgcgcgagttgatgtactggaatctcgataataccgcgcgtagcgagtgggccaatctggtgaagagcaagagtaaaacagagcaggctcaactggcgcggtatgctttcaacaaccaatggtgggatcttagcgttcaggcaacgatcgccgggaagctgtgggatcatctggaagagcgattcccgctggcttacaacgatcttttcaaacgctacaccagcggtaaggagatcccgcaaagctatgcgatggcgattgctcgtcaggagagcgcctggaatccgaaagtgaaaagtccggtaggggccagcggcttgatgcagattatgcctggtacagcgacccatacggtgaagatgttctctattcccggttatagcagtcctgggcaattgctggatccggaaacgaatatcaacattggcaccagttacctgcaatatgtttatcagcagtttggcaataatcgtattttctccagtgcagcttataacgccggaccagggcgggtgcgaacctggcttggcaacagcgccgggcgtatcgacgcagtggcatttgtcgagagtattccattctccgagacgcgcggttatgtgaagaacgtgctggcttatgacgcttactaccgctatttcatgggggataaaccgacgttgatgagcgccacggaatggggacgtcgttactgatccgcacgtttatgatatgctatcgtactctttagcgagtacaaccgggggaggcattttgcttcccccgctaacaatggcgacatattatggcccaacaaagtccctatagtgcagcgatggcagaacagcgtcaccaggagtggttacgttttgtcgacctgcttaagaatgcctaccaaaacgatctccatttaccgttgttaaacctgatgctgacgccagatgagcgcgaagcgttggggactcgcgtgcgtattgtcgaagagctgttgcgcggcgaaatgagccagcgtgagttaaaaaatgaactcggcgcaggcatcgcgacgattacgcgtggatctaacagcctgaaagccgcgcccgtcgagctgcgccagtggctggaagaggtgttgctgaaaagcgattgattttgtaggcctgataagacgtggcgcatcaggcatcgtgcaccgaatgccggatgcggcgtgaacgccttatccgtcctacaaatacccgtaatttcaatatgtttggtaggcatgataagacgcggcagcgtcgcatcaggcgcttaatacacggcattatgaaacggactcagcgccaggatcaccgcctggtgatagacgctggcgcgagtgagtttcccggcggtaaacacgccgatcgccccttccttacgaccaatctcatcaataccggtataacggctcatcacgggaccaagcgcctcaccttcacgcactttttccagaatcaccgcaggcaacggcaaagtagcgctacgcgcctcgccgcgctggctggcgttttcaatcaccacccaactgaaagtgctgtcaccatcgatgccagcttcaatcgccacccaaaaatcagcctctggaagtaaacggcgggcattggctacccgatttcgtgcgccagcgcgcgtttcctcactgccaaagggctgttccggtacaccgctctcgacggcaacggatgcaatatggcaggatccttcgccgaagatctcgtgaaatgcctgcagaatggcctgaattttagcgggattggtggtcgcacagacaacttggtgcataatcagcattactcagaaaattaacgttacagcagtatacggaaaaaaagcatgttacaggtatacctagtccgccacggtgaaacgcagtggaacgccgagcgacgtattcagggccagtctgacagcccgctgaccgccaaaggtgagcaacaggcgatgcaggtggcaacccgtgccaaagagcttggcattacgcatatcatcagtagcgatttaggacgcacccggcgtacggcggaaatcatcgcccaggcctgcggctgtgacatcatctttgattctcgcctgcgtgaattaaacatgggtgtgctggaaaaaagacatatcgattctctgaccgaagaagaagagaactggcgtcggcagctggtcaatggcaccgttgacgggcgtattcctgaaggcgagagtatgcaggagctcagcgatcgcgtcaatgcggcactggaatcttgccgggacttaccgcagggaagccgaccgctgctggtgagtcatggtattgcactgggatgcctggtgagtacgattctcggattaccagcatgggcagagcgccgcttacgtctgcgtaactgttctattagccgcgtggattatcaggaaagcctgtggctggcgtctggctgggtcgttgaaaccgcaggggacatcagccatctggacgcccctgcattagatgagctgcagcgttaacgacggatcggaatcagcagttcacagcgtagattaattgggcgatctcccgctttggcatcttctgccgggtagtatcgctcaatatcctgacctttacggcgcgtcaggttgagcattggcatgcacgttccgtataccgtcaggataaactcctgcacgccggttcccagaccttcataggtaaacatcacatattcgccgccctgcagcatcaccggatgccccgtcagtacatagccatctgcctgatcctgggctaacgcggtggtatagaatacctcttgctcgtcgtctttatcctgactcggacgcgtttcattcaggccgtagagcaccggcggaatggtcggcgcgttgccgagaaaatcgtgccagaactgataacgcatttcatggcggaaatcagagatttgctccaggctacaggagtagctctgggtaacaccaatcagcggcgtatcttccagggtgacaaatttgtgctctggcatagtgaattcacccaggcgtagcggcgggcgaataccaaaggcgctccattcaggagaacggcggtaaagtgcaggagtctgggcaaactgcttcttgaatgcgcgggtaaatgtctgttgagagtcgaagcggtattgcagcgcgatgtccagaatcggacgcgcagtcaggcgtagtgcgaccgcgcttttgctcaaacgacgagcacgaatatacgcgccaatagcatggccagtgacatctttaaacattctctgtaagtgccacttggaataacctgctttcgccgctacattgtcgaggctcaggggctgatccagatgaccttccagccagattaaaaggtcgcgaataatgccggcctgatccataaaatatcctcatcctttcaacaacgagcacctgacatcaggtaattggataatagcattttttgctgttttagcattcagtgtttttttcttagtagagtatgttttagggcttgacggaaataaaagtattgagattttgttcttaatcaatatgttatttaccgtgacgaactaattgctcgtgtaatagataaaaatggtaacaatatgaaatacaagcatttgatcctgtctttaagcctgataatgctggggccattggctcatgcagaagagattggtagcgtcgacaccgtatttaaaatgatcggcccggatcacaaaattgttgtggaagcctttgatgatcccgatgtgaaaaatgtcacctgttatgtgagccgggcgaaaaccggtggtattaaagggggattgggtctggcggaagatacctccgatgcggccatttcttgtcagcaagtcgggccgattgaactgagcgatcgtattaaaaacggcaaagctcagggcgaggtagtattcaaaaaacgcacgtccctggtctttaagagcttacaggtcgtgcgcttttatgatgccaaacgcaacgcgctcgcttatctggcttactccgacaaagttgtagaaggtagcccgaaaaacgcgattagcgcggttcctgtcatgccgtggcggcaataacagaggcgatttatgcaacgggaaacggtctggttagtggaagatgagcaagggatagccgacacgctggtctacatgttgcagcaggaaggttttgccgtcgaggtctttgagcgaggcttgccggtgctggataaagctcgcaagcaggtacccgacgtcatgattctcgatgttggtctgccggatattagcggctttgaattgtgccgccagttactggcgctccatccggcgttacctgtactgttcctgacggcccgaagtgaagaggtcgatcgcctgcttgggctggaaattggtgctgacgactacgtggctaaaccgtttagtccccgcgaagtgtgcgccagggtgcgcaccttactgcgtcgggtgaagaagttcagcacgccgtctcccgtcatccgtattggacattttgaattgaatgaacccgcggcgcagatcagctggtttgacacgccattagcgctgactcggtatgagtttttattgttgaagacgttactcaagagtccgggccgcgtctggtcccgccagcaactgatggatagcgtatgggaagatgcgcaggacacctacgatcgcaccgtcgatacccacattaaaacgctgcgtgccaagctgcgcgccatcaaccccgatcttagtccgattaatactcatcgcggcatgggatatagcctgaggggcctgtaatgcgtatcggcatgcggttgttgctgggctattttttactggtggcggtggcagcctggttcgtactggccatttttgtcaaagaagttaaaccgggcgtgcgaagagcaacggaggggacgttgatcgacaccgcaacgttgctggcggagctggcgcgtcccgatttgctctctggggacccaacgcatgggcaactggcgcaggcgtttaatcagctacaacatcgcccgtttcgcgccaatatcggtggcattaacaaagtgcgcaatgaatatcatgtctatatgaccgatgcgcagggcaaagtattgttcgatagcgcaaataaagccgttggacaggattatagccgctggaatgacgtctggctaacgttgcgtggtcagtatggtgcgcgcagcacgttgcaaaatcctgccgatcccgaaagttctgtgatgtatgttgccgcaccgattatggacggcagccggcttattggcgttttgagcgtaggcaaaccgaacgcggcgatggctccggtcattaagcgtagcgagcggcgaattttatgggccagcgccattttgttggggattgcactggtgattggcgcaggcatggtttggtggatcaaccgctctattgcccggctcactcgctatgctgattccgtcactgacaataagcccgttcctctccccgatctcggtagtagcgagttgcgtaaactcgcgcaggcgctggaaagtatgcgcgtgaagctggaagggaaaaactatattgagcagtatgtttacgcattaactcatgagctaaaaagcccactggcggcgattcgtggagcggcggaaattttacgcgaaggtccgccgccggaagtggtggctcgttttactgacaacattctgacgcaaaatgcgcgtatgcaggcattggtagaaacgttactacgccaggcaagactggagaatcgtcaggaagtcgttctgactgctgttgatgtggcggcattattccgccgcgtcagcgaagcgcgcaccgtgcagttggcagaaaaaaaaatcactctgcatgttacgcccaccgaggttaacgttgctgctgaaccggcgttactggagcaggcgctgggaaatttactggataacgccatcgattttacccccgagagcggttgcatcacgctaagcgccgaagtggatcaggaacacgtcacgcttaaggtgctggataccggtagtggtattcctgactacgcgcttagtcgtatttttgaacgcttttactctttgcctcgtgcaaatgggcaaaaaagcagcggtctggggttggcgttcgtcagtgaggtcgcccgtttgtttaacggcgaagtcacgctgcgcaacgtgcaggaaggtggcgtgctggccagccttcgacttcaccgtcacttcacataacttcaaattcttcccacatagtcttcgtatcctgctgccattgcaaaggagaagactatgttgaaatcccccctgttctggaaaatgactagcctgtttggtgcagtattgctgttgttgattccgataatgctgattcggcaggtgattgtcgaacgtgctgattaccgtagcgatgtggaagatgcgattcgccaaagtaccagcgggccgcaaaaactcgttgggccgctcatcgctattcctgtgaccgagctttatacggtgcaggaagaggataaaaccgtggagcggaaacgaagttttatccatttttggttacctgagagtttgatggttgatggcaatcagaacgtggaagaacgcaagatagggatttataccggtcaggtctggcacagtgatttaacgttaaaagccgatttcgatgttagccgtcttagcgaactcaacgcgccaaatatcaccttaggcaagccatttattgtgattagcgtcggggatgcgcgtggtattggtgtggtgaaagcgcctgaagttaacggaacggcgctgaccattgaacccggcaccgggttagagcaaggcgggcagggcgtgcatatccctttacctgaaggggactggcggaagcagaacctgaagctgaatatggccctgaatttaagcggtaccggcgatctttctgtggtgcctggcgggcgtaatagcgaaatgaccttaaccagcaactggccgcatcccagttttttaggtgattttctaccagccaaacgggaagttagcgagagtggttttcaggcgcactggcaaagcagctggtttgctaataatctcggtgagcgttttgctagtggcaatgataccggctgggaaaacttcccggcgtttagcgtcgcagtaacgacgccagccgatcaataccaattaactgaccgggcgactaagtacgccattctgctgattgcactgacttttatggcgttctttgtttttgaaacgctcaccgcgcaacgtttacacccaatgcaatatttgctggtggggcttagtttggtgatgttttatttgctcttgctggcgctttctgaacataccggttttaccgtggcatggataatcgccagtctgattggggcgataatgaacggtatttatttgcaagcggtattgaaaggttggtgcaacagcatgttgtttaccctcgcgctgttgttgctggatggtgtgatgtggggactgctcaactctgccgatagcgcgctgttgttgggaaccagtgtgctggtggtggcgctggccggcatgatgtttgtgacccgtaatatcgactggtatgcgtttagtctgccgaaaatgaaagccagtaaagaagttacaacggacgatgagttacgtatctggaaataaggttgaaaaataaaaacggcgctaaaaagcgccgttttttttgacggtggtaaagccgattaatcttccagatcaccgcagaagcgataaccttcaccgtgaatggtggcgatgatttccggcgtatccggcgtagattcgaaatgtttacgaatacggcggatcgtcacgtctacagtacggtcgtgcggtttcagctcacggccggtcattttcttcagcagttcagcacgggactgaattttgcctgggttttcacagaagtgaagcatggcgcggaactcgctgcgcggcagcttgtactgctcgccatcagggccgatcaagctacggctgttgatgtccagttcccaaccattgaacttgtagctttcaacgctacgacgttcttcgctgacagtacccagattcatggtacgggacagtaggttgcgtgcacgaatcgtcagttcacgcgggttgaacggtttggtgatgtagtcatctgcaccgatttcgaggccgagaattttatcgacttcgttgtcacggccagtcaggaacatcaacgcaacattcgcctgctcgcgcagttcacgcgctaacagaagaccgttcttacccggcagattgatatccatgatcaccaggttgatgtcatattcagagaggatctgatgcatttccgcgccatctgtcgcttcgaaaacatcatagccttccgcttcgaaaatacttttcaacgtgttgcgtgttaccaactcgtcttcaacgataagaatgtgcggggtctgcatgtttgctacctaaattgccaactaaatcgaaacaggaagtacaaaagtccctgacctgcctgatgcatgctgcaaattaacatgatcggcgtaacatgactaaagtacgtaattgcgttcttgatgcactttccatcaacgtcaacaacatcattagcttggtcgtgggtactttccctcaggacccgacagtgagtaaaacggctgtcatcctaaccattttaacagcaacataacaggctaagaggggccggacacccaataaaactacgcttcgttgacatatatcaagttcaattgtagcacgttaacagtttgatgaaatcatcgtatctaaatgctagctttcgtcacattattttaataatccaactagttgcatcatacaactaataaacgtggtgaatccaattgtcgagatttattttttataaaattatcctaagtaaacagaaggatatgtagcattttttaacaactcaaccgttagtacagtcaggaaatagtttagccttttttaagctaagtaaagggctttttctgcgacttacgttaagaatttgtaaattcgcaccgcgtaataagttgacagtgatcacccggttcgcggttatttgatcaagaagagtggcaatatgcgtataacgattattctggtcgcacccgccagagcagaaaatattggggcagcggcgcgggcaatgaaaacgatggggtttagcgatctgcggattgtcgatagtcaggcacacctggagccagccacccgctgggtcgcacatggatctggtgatattattgataatattaaagttttcccgacattggctgaaagcttacacgatgtcgatttcactgtcgccaccactgcgcgcagtcgggcgaaatatcattactacgccacgccagttgaactggtgccgctgttagaggaaaaatctagttggatgagccatgccgcgctggtgtttggtcgcgaagattccgggttgactaacgaagagttagcgttggctgacgttcttactggtgtgccgatggtggcggattatcctagcctcaatctggggcaggcggtgatggtctattgctatcaattagcaacattaatacaacaaccggcgaaaagtgatgcaacggcagaccaacatcaactgcaagctttacgcgaacgagccatgacattgctgacgactctggcagtggcagatgacataaaactggtcgactggttacaacaacgcctggggcttttagagcaacgagacacggcaatgttgcaccgtttgctgcatgatattgaaaaaaatatcaccaaataaaaaacgccttagtaagtatttttc
